(19) United States
(12) Patent Application Publication
(10) Pub. No.: US 2025/0340857 A1
(43) Pub. Date: Nov. 6, 2025

(54) IgE PROTEASES AND USES THEREOF

(71) Applicant: Seismic Therapeutic, Inc., Watertown, MA (US)

(72) Inventors: Nathan Rollins, Boston, MA (US); Jordan Anderson, Cambridge, MA (US); Ryan Peckner, Berkeley, CA (US); Jung-Eun Shin, Watertown, MA (US); Nathan Higginson-Scott, Hingham, MA (US); Kevin Lewis Otipoby, Ashland, MA (US); Ivan Mascanfroni, Worcester, MA (US); Yi Xing, Andover, MA (US); Purvi Mande, Boston, MA (US); Emily Hoyt, Boston, MA (US)

(21) Appl. No.: 19/196,457

(22) Filed: May 1, 2025

Related U.S. Application Data
(60) Provisional application No. 63/641,205, filed on May 1, 2024.
(60) Provisional application No. 63/744,760, filed on Jan. 13, 2025.
(60) Provisional application No. 63/797,927, filed on Apr. 30, 2025.

(51) Int. Cl. C12N 9/50; A61K 38/00

(52) U.S. Cl. CPC C12N 9/50; A61K 38/00

(57) ABSTRACT

Embodiments provided herein, provide for polypeptides and molecules comprising a polypeptide having protease activity, pharmaceutical compositions comprising the same, and methods that can be used to treat disorders, such as IgE mediated disorders.

### CROSS-REFERENCE TO RELATED APPLICATIONS

[0001] This application claims priority to U.S. Provisional Application No. 63/641,205, filed May 1, 2024, U.S. Provisional Application No. 63/744,760, filed Jan. 13, 2025, and U.S. Provisional Application No. 63/797,927, filed Apr. 30, 2025, each of which is hereby incorporated by reference in its entirety.

### REFERENCE TO SEQUENCE LISTING SUBMITTED ELECTRONICALLY

[0002] The instant application contains a Sequence Listing which has been submitted electronically in XML file format and is hereby incorporated by reference in its entirety. Said XML copy, created on Apr. 27, 2025, is named “SES-011WO_SL.xml” and is 1,316,473 bytes in size.

### FIELD

[0003] The embodiments provided herein relate to polypeptides comprising a polypeptide having protease activity, and compositions comprising the same.

### BACKGROUND

[0004] Immunoglobulin E is one of the five classes of immunoglobulins (IgM, IgG, IgD, IgA, IgE). IgE is the least abundant serum immunoglobulin and has an array of physiological functions, such as Type I hypersensitivity reactions, parasitic infections, and autoimmune processes. Pathologically, IgE induces type I hypersensitivity reactions through activation of mast cells and basophils and the induction of TH2 responses resulting in atopic diseases. The existence of autoreactive IgE antibodies in SLE has long been known. IgE has a high affinity for FcεRI, often referred to as the high-affinity Fc receptor for IgE. FcεRI is expressed on mast cells, basophils, Langerhans cells and eosinophils. Due to the high affinity of FcεRI for its IgE ligand, mast cells and basophils are covered with relatively long-lived FcεRI-IgE complexes. Upon ligation with bivalent or multivalent antigens specifically recognized by the bound IgE molecules, the FcεRI molecules transduce signals that activate the mast cells or basophils to secrete potent mediators of inflammation, such as histamine. These mediators are responsible for the symptoms associated with asthma, allergic rhinitis, and anaphylaxis. IgE is secreted by, and expressed on the surface of, B-cells (Godwin L, Sinawe H, Crane JS. Biochemistry, Immunoglobulin E. [Updated 2022 Sep. 24]. In: StatPearls [Internet]. Treasure Island (FL): StatPearls Publishing; 2024 January). IgE synthesized by B-cells is anchored to the B-cell membrane by a transmembrane domain linked to the mature IgE sequence by a short membrane binding region. IgE may also bind to B-cells (and monocytes, eosinophils and platelets) through its Fc domain to a low affinity IgE receptor (FcεRII). Upon exposure of a mammal to an allergen, B-cells are clonally amplified which synthesize IgE that binds the allergen. This IgE in turn is released into the circulation by the B-cells where it is bound by B-cells (through FcεRII) and by mast cells and basophils through the so-called high affinity receptor (FcεRI) found on the surface of the mast cells ad basophils. Such mast cells and basophils are thereby sensitized for allergen. Once initial exposure to an antigen has occurred, and an immune response has been activated, antigen-specific IgE will remain bound via the Fc-epsilon RI receptor to mast cells and basophils. It has been shown that binding alone of IgE to that receptor cause IgE-dependent upregulation of mast cell Fc-epsilon RI receptor expression, which allows these cells to bind more IgE antibodies. (Galli S J, Tsai M. IgE and mast cells in allergic disease. Nat Med. 2012 May 4; 18 (5): 693-704) IgE has a short half-life in plasma, usually less than a day. However, IgE bound to a high-affinity receptor (Fc-epsilon RI) can remain attached to mast cells in tissues for weeks to months. (Oettgen HC. Fifty years later: Emerging functions of IgE antibodies in host defense, immune regulation, and allergic diseases. J Allergy Clin Immunol. 2016 June; 137 (6): 1631-1645) IgE plays a central role in allergy sensitization and atopic disorders such as allergic rhinitis, asthma, and atopic dermatitis. To be able to effectively reduce, or eliminate such antibodies is therefore an important clinical challenge. The embodiments provided for herein fulfill this need as well as others.

### SUMMARY

[0005] In some embodiments, a polypeptide has the amino acid sequence of:

(SEQ ID NO: 917)
X₁TALGRRKAEDRIKETLWADGVKIDEKDFEHIX₉₃SSHEDYFAVEYGK
GSGYYDVNKKMDSEDX₁₂₂ALCVGX₁₂₈VVTNMFHWWVX₁₃₉QNRENIEKF
KX₁₅₀QDX₁₅₃ENNGVMKFX₁₆₂GVKEATVDELNX₁₇₄FYX₁₇₇YADQSRFFD
LIKX₁₉₆HFX₁₉₉NKALNPEELFELYFNGFYYX₂₁₉SSX₂₂₂RYIEDNX₂₂₉P
AQNNLFSKVLX₂₄₁NNKLLNPERSYGIDGFSNNVX₂₆₂NALKSHKVLGLV
X₂₇₅TTPLX₂₈₀YRHIISMWGADIDQDGKVKAIYVTDSDDREITFNDNSK
RRIGMX₃₂₄RYDVLVDDX₃₃₃GNIRFTGKGX₃₄₃THKEEGAIYAGLYSLS
X₃₆₀GDEVWEDYFKKYPEVQENLX₃₈₀,

wherein at least one X₉₃, X₁₂₂, X₁₂₈, X₁₃₉, X₁₅₀, X₁₅₃, X₁₆₂, X₁₇₄, X₁₇₇, X₁₉₆, X₁₉₉, X₂₁₉, X₂₂₂, X₂₂₉, X₂₄₁, X₂₆₂, X₂₇₅, X₂₈₀, X₃₂₄, X₃₃₃, X₃₄₃, and X₃₆₀ is mutated as compared to SEQ ID NO: 1, wherein X₃₈₀ comprises the amino acid sequence having the formula as set forth in SEQ ID NO: 744 or is absent, and wherein X₁ comprises the amino acid sequence of SEQ ID NO: 248, or is absent. In some embodiments, X₁₂₈ is alanine (A), X₁₅₃ is proline (P), X₁₆₂ is glutamic acid (E), X₂₂₉ is glutamic acid (E), X₃₂₄ is isoleucine (I), and X₃₃₃ is asparagine (N). In some embodiments, X₁₂₈ is alanine (A), X₁₅₃ is proline (P), X₁₆₂ is glutamic acid (E), X₁₇₄ is glutamic acid (E), X₁₇₇ is an amino acid sequence RDNRDN (SEQ ID NO: 743), X₂₁₉ is glycine (G), X₂₂₉ is glutamic acid (E), X₂₇₅ is tyrosine (Y), X₃₂₄ is isoleucine (I), and X₃₃₃ is asparagine (N). In some embodiments, X₉₃ is aspartic acid (D), X₁₂₂ is serine(S), X₁₂₈ is alanine (A), X₁₅₀ is glutamic acid (E), X₁₅₃ is proline (P), X₁₆₂ is glutamic acid (E), X₁₇₄ is glutamic acid (E), X₁₇₇ is an amino acid sequence RDNRDN (SEQ ID NO: 743), X₁₉₉ is proline (P), X₂₁₉ is glycine (G), X₂₂₉ is glutamic acid (E), X₂₄₁ is aspartic acid (D), X₂₇₅ is tyrosine (Y), X₃₂₄ is isoleucine (I), and X₃₃₃ is asparagine (N). In some embodiments, X₉₃ is aspartic acid (D), X₁₂₂ is serine(S), X₁₂₈ is alanine (A), X₁₃₉ is glutamic acid (E), X₁₅₀ is glutamic acid (E), X₁₅₃ is proline (P), X₁₆₂ is glutamic acid (E), X₁₇₄ is glutamic acid (E), X₁₇₇ is an amino acid sequence RDNRDN (SEQ ID NO: 743), X₁₉₆ is serine(S), X₁₉₉ is proline (P), X₂₁₉ is glycine (G), X₂₂₂ is glutamine (Q), X₂₂₉ is glutamic acid (E), X₂₄₁ is aspartic acid (D), X₂₆₂ is lysine (K), X₂₇₅ is tyrosine (Y), X₂₈₀ is threonine (T), X₃₂₄ is isoleucine (I), X₃₃₃ is asparagine (N), X₃₄₃ is lysine (K), and X₃₆₀ is leucine (L). In some embodiments, the polypeptide comprises the amino acid sequence of any one of SEQ ID NO: 380, 251, 5-243, 247, 280-379, 381-528, 737, 745-823, 828-864, or 885-916.

[0006] In some embodiments, a polypeptide has IgE protease activity, wherein the polypeptide: a) has at least 50% identity to SEQ ID NO: 1; b) comprises: i) a cysteine (C) at a position in the polypeptide that corresponds to position 125 of SEQ ID NO: 1; ii) a histidine (H) at a position in the polypeptide that corresponds to position 283 of SEQ ID NO: 1; iii) an aspartic acid (D) at a position in the polypeptide that corresponds to position 305 of SEQ ID NO: 1; and iv) at least one mutation in the polypeptide as compared to SEQ ID NO: 1 that corresponds to position 68, 71, 75, 79, 84, 86, 88, 91, 93, 94, 102, 112, 115, 116, 117, 120, 122, 125, 126, 128, 139, 142, 143, 148, 149, 150, 152, 153, 160, 162, 164, 165, 166, 167, 174, 175, 177_183, 180, 182, 183, 185, 189, 196, 197, 199, 200_202, 201, 205, 206, 212, 219, 220, 221, 222, 224, 228, 229, 232, 233, 241, 242, 243, 244, 250, 251, 252, 254, 260, 262, 263, 268, 270, 271_287, 274, 275, 276, 279, 280, 281, 282, 293, 294, 295, 297, 301, 303, 303_326, 306, 307_322, 308_324, 309, 310, 310_320, 311_319, 311_321, 313, 314, 315_317, 316, 318, 319, 320, 324, 327, 329, 332, 333, 336, 343, 346, 347, 348, 351, 360, 363, 364, 366, 374, and 380 of SEQ ID NO: 1. In some embodiments, the polypeptide comprises: an aspartic acid (D) at a position in the polypeptide that corresponds to position 307 of SEQ ID NO: 1; and/or a lysine (K) at a position in the polypeptide that corresponds to position 115 of SEQ ID NO: 1. In some embodiments, the polypeptide does not comprise the contiguous sequence of amino acid residues 1-52 (1_52del) or 1-61 (1_61del) of SEQ ID NO: 1. In some embodiments, the polypeptide does not comprise contiguous sequence of amino acid residues 380-529 (380_529del) of SEQ ID NO: 1. In some embodiments, the polypeptide does not comprise the contiguous sequence of amino acid residues 1-52 and 380-529 of SEQ ID NO: 1. In some embodiments, the polypeptide does not comprise the contiguous sequence of amino acid residues 1-61 and 380-529 of SEQ ID NO: 1. In some embodiments, the polypeptide: a) has at least 50% identity to SEQ ID NO: 3, wherein X is a methionine, signal peptide, or absent; b) comprises: i) a cysteine (C) at a position in the polypeptide that corresponds to position 125 of SEQ ID NO: 1; ii) a histidine (H) at a position in the polypeptide that corresponds to position 283 of SEQ ID NO: 1; and iii) an aspartic acid (D) at a position in the polypeptide that corresponds to position 305 of SEQ ID NO: 1; and iv) at least one mutation in the polypeptide as compared to SEQ ID NO: 1 that corresponds to position 68, 71, 75, 79, 84, 86, 88, 91, 93, 94, 102, 112, 115, 116, 117, 120, 122, 125, 126, 128, 139, 142, 143, 148, 149, 150, 152, 153, 160, 162, 164, 165, 166, 167, 174, 175, 177_183, 180, 182, 183, 185, 189, 196, 197, 199, 200_202, 201, 205, 206, 212, 219, 220, 221, 222, 224, 228, 229, 232, 233, 241, 242, 243, 244, 250, 251, 252, 254, 260, 262, 263, 268, 270, 271_287, 274, 275, 276, 279, 280, 281, 282, 293, 294, 295, 297, 301, 303, 303_326, 306, 307_322, 308_324, 309, 310, 310_320, 311_319, 311_321, 313, 314, 315_317, 316, 318, 319, 320, 324, 327, 329, 332, 333, 336, 343, 346, 347, 348, 351, 360, 363, 364, 366, 374, and 380 of SEQ ID NO: 1, wherein the polypeptide does not comprise the contiguous sequence of amino acid residues 1-61 and/or 380-529 of SEQ ID NO: 1. In some embodiments, the polypeptide comprises an amino acid sequence having at least 51%, at least 52%, at least 53%, at least 54%, at least 55%, at least 56%, at least 57%, at least 58%, at least 59%, at least 60%, at least 61%, at least 62%, at least 63%, at least 64%, at least 65%, at least 66%, at least 67%, at least 68%, at least 69%, at least 70%, at least 71%, at least 72%, at least 73%, at least 74%, at least 75%, at least 76%, at least 77%, at least 78%, at least 79%, at least 80%, at least 81%, at least 82%, at least 83%, at least 84%, at least 85%, at least 86%, at least 87%, at least 88%, at least 89%, at least 90%, at least 91%, at least 92%, at least 93%, at least 94%, at least 95%, at least 96%, at least 97%, at least 98%, or at least 99% identity to SEQ ID NO: 1. In some embodiments, the mutation is a substitution, insertion, or deletion. In some embodiments, the polypeptide comprises one or more mutations of D71E, D71Q, D88H, D112Q, D152N, D139E, D307N, D293G, D295K, D295N, E75Y, E86D, E120D, E120G, E143D, E166Q, E241D, E310D, E310N, E310Q, E310S, E347N, E347R, E348R, E363K, E366K, F148Y, F175I, F333D, F333E, F333N, G199P, H174D, H174E, H197D, H197K, H197R, H222E, H222Q, H222S, H222T, H268G, H268R, H268S, H275L, H275Y, I84G, I84P, 184V, I262K, I301L, 1336A, K68W, K93D, K93S, K115L, K116D, K149L, K150E, K160E, K165E, K167R, K183D, K195L, K195R, K196D, K196E, K196L, K196Q, K196S, K196T, K201E, K201S, K205L, K229D, K229E, K229N, K244L, K297N, K297R, K318A, K318D, K318E, K318F, K318G, K318I, K318L, K318N, K318P, K318Q, K318S, K318V, K320W, K324I, K346P, K360R, L153P, L279G, L279T, L279W, L279Y, L329K, L329R, M117E, M117F, M323L, N162D, N162E, N173K, N182D, N182P, N219G, N219K, N219Q, N219T, N228K, N233G, N242G, N243K, N260A, P205F, P205FG, P205L, P205LG, Q180H, Q232E, Q294E, R142K, R189K, R250GGYGG (SEQ ID NO: 918), R250GYG, R256D, R282G, R282N, R280A, R280D, R280E, R280N, R280T, R280Y, R309G, R319E, R319T, R320L, R320Q, R320W, R337L, R360L, S94D, S94E, S94N, S128A, S181D, S220Y, S221E, S221N, S221Y, S251I, S286T, S306P, S317N, T122E, T122N, T122S, T167G, T176G, T276G, T276R, V102A, V102L, V164K, V270P, V274G, V303I, V303Y, V364E, Y212F, Y217W, Y224T, Y252R, Y281H, Y281S, Y281T, Y360L, 177_183delinsRDNRDN (SEQ ID NO: 919), 177_183KEYQSNKdelinsESDHG (SEQ ID NOs: 920 and 921), 177_183KEYQSNKdelinsRDNRDN (SEQ ID NOs: 920 and 919), 177_185KEYQSNKYAdelinsESPNT (SEQ ID NOs: 922 and 923), 177_318KEYQSNKNSKdelinsRDNRDN (SEQ ID NOs: 924 and 919), 177_319KEYQSNKDRdelinsRDNRDN (SEQ ID NOs: 925 and 919), 177_319KEYQSNKFNDNSKRdelinsRDNRDNIGDE (SEQ ID NOs: 926 and 927), 177_317KEYQSNKNDNSdelinsRDNRDN (SEQ ID NOs: 928 and 919), 180_185QSNKYAdelinsSG (SEQ ID NO: 929), 200_202NKAdelinsPYLSTKHL (SEQ ID NO: 930), 271_287delinsVGISGSAGGIKSVDSDGDSYI (SEQ ID NO: 932), 308_324delinsTKSVDSDGDSYKINY (SEQ ID NO: 932), 303_326delinsTGAKGNNYFGHWHFAVRVRL (SEQ ID NO: 933), 306_324delinsGHYGVYNGVTYWGHTPLHLAAMLGHLVYGLY (SEQ ID NO: 934), 306_324delinsQRTPLHLAAWADHLYR (SEQ ID NO: 935), 307_322delinsLAKGNNYFGHWHFAVM (SEQ ID NO: 936), 307_324delinsGGFAFDISIDNGNEDVY (SEQ ID NO: 937), 311_319delinsLLKPKILGYNITSGYSDEIY (SEQ ID NO: 938), 311_321delinsLSNVEALGYNITSGYSDKRY (SEQ ID NO: 939), 310_320delinsFLVFGVTYDGSTPVP (SEQ ID NO: 940), 311_321delinsLSNVEALGYNITSGYSDKRY (SEQ ID NO: 939), 86_105delinsDDMEAKGNNYFGHWHFAVATN (SEQ ID NO: 941), 88_102delinsGEIVAFDISIDNGNEDLAEILQLSTYDGGG (SEQ ID NO: 942), 91_100delinsGGGGGKSVDSDGDSYGGGGG (SEQ ID NO: 943), 93_98delinsGGGGGKSVDSDGDSYGGGG (SEQ ID NO: 944), 174_187delinsVMYKGKKLLEAARAGQPDSSE (SEQ ID NO: 945), 271_287delinsVGISGSAGGIKSVDSDGDSYI (SEQ ID NO: 932), 303_326delinsTGAKGNNYFGHWHFAVRVRL (SEQ ID NO: 933), 308_324delinsTKSVDSDGDSYKINY (SEQ ID NO: 932), and 380insENNVADSNKNSEDVEVSSVEFDFLNFKYPKNEDQVSTEDMRLTLKDTNVFNQPQ VKISFEEQNGNDWKEKDSGTFEEGKKYRLKIDVNKLALKIYGHLSKNKLNVIVNGKAV NIQNVVKKDSIETSFTIYSDSIDLEKINYWTDSFNNWS (SEQ ID NO: 744), wherein the positions correspond to SEQ ID NO: 1. In some embodiments, the polypeptide comprises any one of mutation sets as set forth in Table 3A or Table 3B. In some embodiments, the polypeptide comprises the amino acid sequence having at least 51%, at least 52%, at least 53%, at least 54%, at least 55%, at least 56%, at least 57%, at least 58%, at least 59%, at least 60%, at least 61%, at least 62%, at least 63%, at least 64%, at least 65%, at least 66%, at least 67%, at least 68%, at least 69%, at least 70%, at least 71%, at least 72%, at least 73%, at least 74%, at least 75%, at least 76%, at least 77%, at least 78%, at least 79%, at least 80%, at least 81%, at least 82%, at least 83%, at least 84%, at least 85%, at least 86%, at least 87%, at least 88%, at least 89%, at least 90%, at least 91%, at least 92%, at least 93%, at least 94%, at least 95%, at least 96%, at least 97%, at least 98%, or at least 99% identity to SEQ ID NO: 380, 251, 5-243, 247, 280-379, 381-528, 737, 745-823, 828-864, or 885-916. In some embodiments, the polypeptide comprises the amino acid sequence of any one of SEQ ID NO: 380, 251, 5-243, 247, 280-379, 381-528, 737, 745-823, 828-864, or 885-916. In some embodiments, the polypeptide is wherein the polypeptide is more effective or more selective at cleaving IgE than the polypeptide of SEQ ID NO: 1, 3, or 91 and is more selective for cleaving IgE than IgG.

[0007] In some embodiments, a polypeptide has IgE protease activity, wherein the polypeptide: a) has at least 50% identity to SEQ ID NO: 1; b) comprises: i) a cysteine (C) at a position in the polypeptide that corresponds to position 125 of SEQ ID NO: 1; ii) a histidine (H) at a position in the polypeptide that corresponds to position 283 of SEQ ID NO: 1; iii) an aspartic acid (D) at a position in the polypeptide that corresponds to position 305 of SEQ ID NO: 1; and iv) any one of mutation sets as set forth in Table 3A or Table 3B as compared to SEQ ID NO: 1. In some embodiments, the polypeptide comprises: an aspartic acid (D) at a position in the polypeptide that corresponds to position 307 of SEQ ID NO: 1; and/or a lysine (K) at a position in the polypeptide that corresponds to position 115 of SEQ ID NO: 1. In some embodiments, the polypeptide does not comprise the contiguous sequence of amino acid residues 1-52 (1_52del) or 1-61 (1_61del) of SEQ ID NO: 1. In some embodiments, the polypeptide does not comprise contiguous sequence of amino acid residues 380-529 (380_529del) of SEQ ID NO: 1. In some embodiments, the polypeptide does not comprise the contiguous sequence of amino acid residues 1-52 and 380-529 of SEQ ID NO: 1. In some embodiments, the polypeptide does not comprise the contiguous sequence of amino acid residues 1-61 and 380-529 of SEQ ID NO: 1. In some embodiments, the polypeptide: a) has at least 50% identity to SEQ ID NO: 3, wherein X is a methionine, signal peptide, or absent; b) comprises: i) a cysteine (C) at a position in the polypeptide that corresponds to position 125 of SEQ ID NO: 1; ii) a histidine (H) at a position in the polypeptide that corresponds to position 283 of SEQ ID NO: 1; and iii) an aspartic acid (D) at a position in the polypeptide that corresponds to position 305 of SEQ ID NO: 1; and iv) any one of mutation sets as set forth in Table 3A or Table 3B as compared to SEQ ID NO: 1. In some embodiments, the polypeptide comprises an amino acid sequence having at least 51%, at least 52%, at least 53%, at least 54%, at least 55%, at least 56%, at least 57%, at least 58%, at least 59%, at least 60%, at least 61%, at least 62%, at least 63%, at least 64%, at least 65%, at least 66%, at least 67%, at least 68%, at least 69%, at least 70%, at least 71%, at least 72%, at least 73%, at least 74%, at least 75%, at least 76%, at least 77%, at least 78%, at least 79%, at least 80%, at least 81%, at least 82%, at least 83%, at least 84%, at least 85%, at least 86%, at least 87%, at least 88%, at least 89%, at least 90%, at least 91%, at least 92%, at least 93%, at least 94%, at least 95%, at least 96%, at least 97%, at least 98%, or at least 99% identity to SEQ ID NO: 1. In some embodiments, the mutation is a substitution, insertion, or deletion. In some embodiments, the polypeptide comprises the amino acid sequence having at least 51%, at least 52%, at least 53%, at least 54%, at least 55%, at least 56%, at least 57%, at least 58%, at least 59%, at least 60%, at least 61%, at least 62%, at least 63%, at least 64%, at least 65%, at least 66%, at least 67%, at least 68%, at least 69%, at least 70%, at least 71%, at least 72%, at least 73%, at least 74%, at least 75%, at least 76%, at least 77%, at least 78%, at least 79%, at least 80%, at least 81%, at least 82%, at least 83%, at least 84%, at least 85%, at least 86%, at least 87%, at least 88%, at least 89%, at least 90%, at least 91%, at least 92%, at least 93%, at least 94%, at least 95%, at least 96%, at least 97%, at least 98%, or at least 99% identity to SEQ ID NO: 380, 251, 5-243, 247, 280-379, 381-528, 737, 745-823, 828-864, or 885-916. In some embodiments, the polypeptide comprises the amino acid sequence of any one of SEQ ID NO: 380, 251, 5-243, 247, 280-379, 381-528, 737, 745-823, 828-864, or 885-916. In some embodiments, the polypeptide is more effective or more selective at cleaving IgE than the polypeptide of SEQ ID NO: 1, 3, or 91 and is more selective for cleaving IgE than IgG.

[0008] In some embodiments, a composition comprises: a) a polypeptide having IgE protease activity, wherein the polypeptide: i) has at least 50% identity to SEQ ID NO: 1; ii) comprises: 1) a cysteine (C) at a position in the polypeptide that corresponds to position 125 of SEQ ID NO: 1; 2) a histidine (H) at a position in the polypeptide that corresponds to position 283 of SEQ ID NO: 1; 3) an aspartic acid (D) at a position in the polypeptide that corresponds to position 305 of SEQ ID NO: 1; and 4) at least one mutation in the polypeptide as compared to SEQ ID NO: 1 that corresponds to position 68, 71, 75, 79, 84, 86, 88, 91, 93, 94, 102, 112, 115, 116, 117, 120, 122, 125, 126, 128, 139, 142, 143, 148, 149, 150, 152, 153, 160, 162, 164, 165, 166, 167, 174, 175, 177_183, 180, 182, 183, 185, 189, 196, 197, 199, 200_202, 201, 205, 206, 212, 219, 220, 221, 222, 224, 228, 229, 232, 233, 241, 242, 243, 244, 250, 251, 252, 254, 260, 262, 263, 268, 270, 271_287, 274, 275, 276, 279, 280, 281, 282, 293, 294, 295, 297, 301, 303, 303_326, 306, 307_322, 308_324, 309, 310, 310_320, 311_319, 311_321, 313, 314, 315_317, 316, 318, 319, 320, 324, 327, 329, 332, 333, 336, 343, 346, 347, 348, 351, 360, 363, 364, 366, 374, and 380 of SEQ ID NO: 1; and b) an Fc domain.

[0009] In some embodiments, a composition comprises: a) a polypeptide having IgE protease activity, wherein the polypeptide: i) has at least 50% identity to SEQ ID NO: 1; ii) comprises: 1) a cysteine (C) at a position in the polypeptide that corresponds to position 125 of SEQ ID NO: 1; 2) a histidine (H) at a position in the polypeptide that corresponds to position 283 of SEQ ID NO: 1; 3) an aspartic acid (D) at a position in the polypeptide that corresponds to position 305 of SEQ ID NO: 1; and 4) any one of mutation sets as set forth in Table 3A or Table 3B as compared to SEQ ID NO: 1; and b) an Fc domain. In some embodiments, the polypeptide comprises: an aspartic acid (D) at a position in the polypeptide that corresponds to position 307 of SEQ ID NO: 1; and/or a lysine (K) at a position in the polypeptide that corresponds to position 115 of SEQ ID NO: 1. In some embodiments, the polypeptide does not comprise the contiguous sequence of amino acid residues 1-52 (1_52del) or 1-61 (1_61del) of SEQ ID NO: 1. In some embodiments, the polypeptide does not comprise contiguous sequence of amino acid residues 380-529 (380_529del) of SEQ ID NO: 1. In some embodiments, the polypeptide does not comprise the contiguous sequence of amino acid residues 1-52 and 380-529 of SEQ ID NO: 1. In some embodiments, the polypeptide does not comprise the contiguous sequence of amino acid residues 1-61 and 380-529 of SEQ ID NO: 1. In some embodiments, the polypeptide: a) has at least 50% identity to SEQ ID NO: 3, wherein X is a methionine, signal peptide, or absent; b) comprises: i) a cysteine (C) at a position in the polypeptide that corresponds to position 125 of SEQ ID NO: 1; ii) a histidine (H) at a position in the polypeptide that corresponds to position 283 of SEQ ID NO: 1; and iii) an aspartic acid (D) at a position in the polypeptide that corresponds to position 305 of SEQ ID NO: 1; and iv) at least one mutation in the polypeptide as compared to SEQ ID NO: 1 that corresponds to position 68, 71, 75, 79, 84, 86, 88, 91, 93, 94, 102, 112, 115, 116, 117, 120, 122, 125, 126, 128, 139, 142, 143, 148, 149, 150, 152, 153, 160, 162, 164, 165, 166, 167, 174, 175, 177_183, 180, 182, 183, 185, 189, 196, 197, 199, 200_202, 201, 205, 206, 212, 219, 220, 221, 222, 224, 228, 229, 232, 233, 241, 242, 243, 244, 250, 251, 252, 254, 260, 262, 263, 268, 270, 271_287, 274, 275, 276, 279, 280, 281, 282, 293, 294, 295, 297, 301, 303, 303_326, 306, 307_322, 308_324, 309, 310, 310_320, 311_319, 311_321, 313, 314, 315_317, 316, 318, 319, 320, 324, 327, 329, 332, 333, 336, 343, 346, 347, 348, 351, 360, 363, 364, 366, 374, and 380 of SEQ ID NO: 1, wherein the polypeptide does not comprise the contiguous sequence of amino acid residues 1-61 and/or 380-529 of SEQ ID NO: 1. In some embodiments, the polypeptide comprises an amino acid sequence having at least 51%, at least 52%, at least 53%, at least 54%, at least 55%, at least 56%, at least 57%, at least 58%, at least 59%, at least 60%, at least 61%, at least 62%, at least 63%, at least 64%, at least 65%, at least 66%, at least 67%, at least 68%, at least 69%, at least 70%, at least 71%, at least 72%, at least 73%, at least 74%, at least 75%, at least 76%, at least 77%, at least 78%, at least 79%, at least 80%, at least 81%, at least 82%, at least 83%, at least 84%, at least 85%, at least 86%, at least 87%, at least 88%, at least 89%, at least 90%, at least 91%, at least 92%, at least 93%, at least 94%, at least 95%, at least 96%, at least 97%, at least 98%, or at least 99% identity to SEQ ID NO: 1. In some embodiments, the mutation is a substitution, insertion, or deletion. In some embodiments, the polypeptide comprises one or more mutations of D71E, D71Q, D88H, D112Q, D152N, D139E, D307N, D293G, D295K, D295N, E75Y, E86D, E120D, E120G, E143D, E166Q, E241D, E310D, E310N, E310Q, E310S, E347N, E347R, E348R, E363K, E366K, F148Y, F175I, F333D, F333E, F333N, G199P, H174D, H174E, H197D, H197K, H197R, H222E, H222Q, H222S, H222T, H268G, H268R, H268S, H275L, H275Y, 184G, 184P, 184V, I262K, I301L, 1336A, K68W, K93D, K93S, K115L, K116D, K149L, K150E, K160E, K165E, K167R, K183D, K195L, K195R, K196D, K196E, K196L, K196Q, K196S, K196T, K201E, K201S, K205L, K229D, K229E, K229N, K244L, K297N, K297R, K318A, K318D, K318E, K318F, K318G, K318I, K318L, K318N, K318P, K318Q, K318S, K318V, K320W, K324I, K346P, K360R, L153P, L279G, L279T, L279W, L279Y, L329K, L329R, M117E, M117F, M323L, N162D, N162E, N173K, N182D, N182P, N219G, N219K, N219Q, N219T, N228K, N233G, N242G, N243K, N260A, P205F, P205FG, P205L, P205LG, Q180H, Q232E, Q294E, R142K, R189K, R250GGYGG (SEQ ID NO: 918), R250GYG, R256D, R282G, R282N, R280A, R280D, R280E, R280N, R280T, R280Y, R309G, R319E, R319T, R320L, R320Q, R320W, R337L, R360L, S94D, S94E, S94N, S128A, S181D, S220Y, S221E, S221N, S221Y, S251I, S286T, S306P, S317N, T122E, T122N, T122S, T167G, T176G, T276G, T276R, V102A, V102L, V164K, V270P, V274G, V303I, V303Y, V364E, Y212F, Y217W, Y224T, Y252R, Y281H, Y281S, Y281T, Y360L, 177_183delinsRDNRDN (SEQ ID NO: 919), 177_183KEYQSNKdelinsESDHG (SEQ ID NOs: 920 and 921), 177_183KEYQSNKdelinsRDNRDN (SEQ ID NOs: 920 and 919), 177_185KEYQSNKYAdelinsESPNT (SEQ ID NOs: 922 and 923), 177_318KEYQSNKNSKdelinsRDNRDN (SEQ ID NOs: 924 and 919), 177_319KEYQSNKDRdelinsRDNRDN (SEQ ID NOs: 925 and 919), 177_319KEYQSNKFNDNSKRdelinsRDNRDNIGDE (SEQ ID NOs: 926 and 927), 177_317KEYQSNKNDNSdelinsRDNRDN (SEQ ID NOs: 928 and 919), 180_185QSNKYAdelinsSG (SEQ ID NO: 929), 200_202NKAdelinsPYLSTKHL (SEQ ID NO: 930), 271_287delinsVGISGSAGGIKSVDSDGDSYI (SEQ ID NO: 932), 308_324delinsTKSVDSDGDSYKINY (SEQ ID NO: 932), 303_326delinsTGAKGNNYFGHWHFAVRVRL (SEQ ID NO: 933), 306_324delinsGHYGVYNGVTYWGHTPLHLAAMLGHLVYGLY (SEQ ID NO: 934), 306_324delinsQRTPLHLAAWADHLYR (SEQ ID NO: 935), 307_322delinsLAKGNNYFGHWHFAVM (SEQ ID NO: 936), 307_324delinsGGFAFDISIDNGNEDVY (SEQ ID NO: 937), 311_319delinsLLKPKILGYNITSGYSDEIY (SEQ ID NO: 938), 311_321delinsLSNVEALGYNITSGYSDKRY (SEQ ID NO: 939), 310_320delinsFLVFGVTYDGSTPVP (SEQ ID NO: 940), 311_321delinsLSNVEALGYNITSGYSDKRY (SEQ ID NO: 939), 86_105delinsDDMEAKGNNYFGHWHFAVATN (SEQ ID NO: 941), 88_102delinsGEIVAFDISIDNGNEDLAEILQLSTYDGGG (SEQ ID NO: 942), 91_100delinsGGGGGKSVDSDGDSYGGGGG (SEQ ID NO: 943), 93_98delinsGGGGGKSVDSDGDSYGGGG (SEQ ID NO: 944), 174_187delinsVMYKGKKLLEAARAGQPDSSE (SEQ ID NO: 945), 271_287delinsVGISGSAGGIKSVDSDGDSYI (SEQ ID NO: 932), 303_326delinsTGAKGNNYFGHWHFAVRVRL (SEQ ID NO: 933), 308_324delinsTKSVDSDGDSYKINY (SEQ ID NO: 932), and 380insENNVADSNKNSEDVEVSSVEFDFLNFKYPKNEDQVSTEDMRLTLKDTNVENQPQ VKISFEEQNGNDWKEKDSGTFEEGKKYRLKIDVNKLALKIYGHLSKNKLNVIVNGKAV NIQNVVKKDSIETSFTIYSDSIDLEKINYWTDSFNNWS (SEQ ID NO: 744), wherein the positions correspond to SEQ ID NO: 1. In some embodiments, the polypeptide comprises any one of mutation sets as set forth in Table 3A or Table 3B. In some embodiments, the polypeptide comprises the amino acid sequence having at least 85%, at least 86%, at least 87%, at least 88%, at least 89%, at least 90%, at least 91%, at least 92%, at least 93%, at least 94%, at least 95%, at least 96%, at least 97%, at least 98%, or at least 99% identity to SEQ ID NO: 380, 251, 5-243, 247, 280-379, 381-528, 737, 745-823, 828-864, or 885-916. In some embodiments, the polypeptide comprises the amino acid sequence of any one of SEQ ID NO: 380, 251, 5-243, 247, 280-379, 381-528, 737, 745-823, 828-864, or 885-916. In some embodiments, the polypeptide is more effective or more selective at cleaving IgE than the polypeptide of SEQ ID NO: 1, 3, or 91 and is more selective for cleaving IgE than IgG. In some embodiments, the Fc domain comprises an amino acid sequence having at least 85%, at least 86%, at least 87%, at least 88%, at least 89%, at least 90%, at least 91%, at least 92%, at least 93%, at least 94%, at least 95%, at least 96%, at least 97%, at least 98%, or at least 99% identity to any one of SEQ ID NO: 721, 724, or 725. In some embodiments, the Fc domain comprises an amino acid sequence of SEQ ID NO: 721, 724, or 725. In some embodiments, the Fc domain comprises a first Fc domain comprising an amino acid sequence having at least 85%, at least 86%, at least 87%, at least 88%, at least 89%, at least 90%, at least 91%, at least 92%, at least 93%, at least 94%, at least 95%, at least 96%, at least 97%, at least 98%, or at least 99% identity to any one of SEQ ID NO: 253, 254, or 722; and a second Fc domain comprising an amino acid sequence having at least 85%, at least 86%, at least 87%, at least 88%, at least 89%, at least 90%, at least 91%, at least 92%, at least 93%, at least 94%, at least 95%, at least 96%, at least 97%, at least 98%, or at least 99% identity to any one of SEQ ID NO: 255, 256, or 723. In some embodiments, the Fc domain comprises: a first Fc domain comprising an amino acid sequence having at least 85%, at least 86%, at least 87%, at least 88%, at least 89%, at least 90%, at least 91%, at least 92%, at least 93%, at least 94%, at least 95%, at least 96%, at least 97%, at least 98%, or at least 99% identity to SEQ ID NO: 253; and a second Fc domain comprising an amino acid sequence having at least 85%, at least 86%, at least 87%, at least 88%, at least 89%, at least 90%, at least 91%, at least 92%, at least 93%, at least 94%, at least 95%, at least 96%, at least 97%, at least 98%, or at least 99% identity to SEQ ID NO: 255; a first Fc domain comprising an amino acid sequence having at least 85%, at least 86%, at least 87%, at least 88%, at least 89%, at least 90%, at least 91%, at least 92%, at least 93%, at least 94%, at least 95%, at least 96%, at least 97%, at least 98%, or at least 99% identity to SEQ ID NO: 254; and a second Fc domain comprising an amino acid sequence having at least 85%, at least 86%, at least 87%, at least 88%, at least 89%, at least 90%, at least 91%, at least 92%, at least 93%, at least 94%, at least 95%, at least 96%, at least 97%, at least 98%, or at least 99% identity to SEQ ID NO: 256; or a first Fc domain comprising an amino acid sequence having at least 85%, at least 86%, at least 87%, at least 88%, at least 89%, at least 90%, at least 91%, at least 92%, at least 93%, at least 94%, at least 95%, at least 96%, at least 97%, at least 98%, or at least 99% identity to SEQ ID NO: 722; and a second Fc domain comprising an amino acid sequence having at least 85%, at least 86%, at least 87%, at least 88%, at least 89%, at least 90%, at least 91%, at least 92%, at least 93%, at least 94%, at least 95%, at least 96%, at least 97%, at least 98%, or at least 99% identity to SEQ ID NO: 723. In some embodiments, the Fc domain comprises: a first Fc domain comprising an amino acid sequence of SEQ ID NO: 253; and a second Fc domain comprising an amino acid sequence of SEQ ID NO: 255; a first Fc domain comprising an amino acid sequence of SEQ ID NO: 254; and a second Fc domain comprising an amino acid sequence of SEQ ID NO: 256; or a first Fc domain comprising an amino acid sequence of SEQ ID NO: 722; and a second Fc domain comprising an amino acid sequence of SEQ ID NO: 723. In some embodiments, the composition comprises an amino acid sequence having at least 85%, at least 86%, at least 87%, at least 88%, at least 89%, at least 90%, at least 91%, at least 92%, at least 93%, at least 94%, at least 95%, at least 96%, at least 97%, at least 98%, or at least 99% identity to any one of SEQ ID NO: 257, 258, 259, 529-720. In some embodiments, the composition comprises an amino acid sequence selected from any one of SEQ ID NO: 257, 258, 259, 529-720.

[0010] In some embodiments, a composition comprises: a) a polypeptide having IgE protease activity, wherein the polypeptide comprises an amino acid sequence of any one of SEQ ID NO: 380, 251, 5-243, 247, 280-379, 381-528, 737, 745-823, 828-864, or 885-916; and b) an Fc domain, wherein the Fc domain comprises an amino acid sequence of SEQ ID NO: 253, 254, 255, 256, 721, 722, 723, 724, or 725. In some embodiments, the polypeptide comprises: an aspartic acid (D) at a position in the polypeptide that corresponds to position 307 of SEQ ID NO: 1; and/or a lysine (K) at a position in the polypeptide that corresponds to position 115 of SEQ ID NO: 1. In some embodiments, the polypeptide does not comprise the contiguous sequence of amino acid residues 1-52 (1_52del) or 1-61 (1_61del) of SEQ ID NO: 1. In some embodiments, the polypeptide does not comprise contiguous sequence of amino acid residues 380-529 (380_529del) of SEQ ID NO: 1. In some embodiments, the polypeptide does not comprise the contiguous sequence of amino acid residues 1-52 and 380-529 of SEQ ID NO: 1. In some embodiments, the polypeptide does not comprise the contiguous sequence of amino acid residues 1-61 and 380-529 of SEQ ID NO: 1. In some embodiments, the polypeptide: a) has at least 50% identity to SEQ ID NO: 3, wherein X is a methionine, signal peptide, or absent; b) comprises: i) a cysteine (C) at a position in the polypeptide that corresponds to position 125 of SEQ ID NO: 1; ii) a histidine (H) at a position in the polypeptide that corresponds to position 283 of SEQ ID NO: 1; and iii) an aspartic acid (D) at a position in the polypeptide that corresponds to position 305 of SEQ ID NO: 1; and iv) any one of mutation sets as set forth in Table 3A or Table 3B as compared to SEQ ID NO: 1, wherein the polypeptide does not comprise the contiguous sequence of amino acid residues 1-61 and/or 380-529 of SEQ ID NO: 1. In some embodiments, the polypeptide comprises an amino acid sequence having at least 51%, at least 52%, at least 53%, at least 54%, at least 55%, at least 56%, at least 57%, at least 58%, at least 59%, at least 60%, at least 61%, at least 62%, at least 63%, at least 64%, at least 65%, at least 66%, at least 67%, at least 68%, at least 69%, at least 70%, at least 71%, at least 72%, at least 73%, at least 74%, at least 75%, at least 76%, at least 77%, at least 78%, at least 79%, at least 80%, at least 81%, at least 82%, at least 83%, at least 84%, at least 85%, at least 86%, at least 87%, at least 88%, at least 89%, at least 90%, at least 91%, at least 92%, at least 93%, at least 94%, at least 95%, at least 96%, at least 97%, at least 98%, or at least 99% identity to SEQ ID NO: 1. In some embodiments, the polypeptide comprises the amino acid sequence having at least at least 85%, at least 86%, at least 87%, at least 88%, at least 89%, at least 90%, at least 91%, at least 92%, at least 93%, at least 94%, at least 95%, at least 96%, at least 97%, at least 98%, or at least 99% identity to SEQ ID NO: 380, 251, 5-243, 247, 280-379, 381-528, 737, 745-823, 828-864, or 885-916. In some embodiments, the polypeptide comprises the amino acid sequence of any one of SEQ ID NO: 380, 251, 5-243, 247, 280-379, 381-528, 737, 745-823, 828-864, or 885-916. In some embodiments, the Fc domain comprises an amino acid sequence having at least 85%, at least 86%, at least 87%, at least 88%, at least 89%, at least 90%, at least 91%, at least 92%, at least 93%, at least 94%, at least 95%, at least 96%, at least 97%, at least 98%, or at least 99% identity to any one of SEQ ID NO: 721, 724, or 725. In some embodiments, the Fc domain comprises an amino acid sequence of SEQ ID NO: 721, 724, or 725.

[0011] In some embodiments, a polypeptide has IgE protease activity and binds to an epitope on Fc portion of IgE, wherein the epitope includes residue S332, N333, P334, R335, G336, V337, S338, A339, D363, L364, A365, P366, K368, A378, K392, R394, N395, G396, T397, R420, H423, P424, H425, L426, P427, R428, A429, M431, R432, S433, or any combination thereof. In some embodiments, the polypeptide having IgE protease activity binds to an epitope on the non-cleaved Fc portion of IgE that includes residues D363, A365, P366, K368, K392, R394, N395, G396, T397, and H425 of the non-cleaved Fc portion of IgE. In some embodiments, the polypeptide having IgE protease activity binds to an epitope on the cleaved Fc portion of IgE that includes residues S332, N333, P334, R335, G336, V337, S338, A339, D363, L364, A365, K368, A378, R420, H423, P424, H425, L426, P427, R428, A429, M431, R432, and S433 of the cleaved Fc portion of IgE.

[0012] In some embodiments, provided for here is a pharmaceutical composition comprising the polypeptide, or composition provided for herein. In some embodiments, a method of reducing IgE immunoglobulins in a subject is provided for herein, the method comprising administering the polypeptide, composition, or pharmaceutical composition provided for herein, to the subject to reduce IgE immunoglobulins in the subject. In some embodiments, a method of treating a disease or disorder in a subject, such as an IgE mediated disease, is provided for herein, the method comprising administering the polypeptide, composition, or pharmaceutical composition provided for herein to the subject to treat the disease or disorder. In some embodiments, a method of treating a subject having, or at risk, or elevated risk, for having, an IgE mediated disease or disorder, is provided for herein, the method comprising administering a therapeutically effective amount of the polypeptide, composition, or pharmaceutical composition provided for herein, thereby treating the subject. In some embodiments, the disease or disorder is selected from chronic spontaneous urticaria (CSU), atopic dermatitis, eczema, angioedema, autoimmune bullous skin diseases, bullous pemphigoid (BP), graft vs. host disease (GVHD), sarcoidosis, hypersensitivity pneumonitis, chronic obstructive pulmonary disease (COPD), asthma, allergic asthma, allergic bronchopulmonary mycosis (ABPM), allergic bronchopulmonary aspergillosis (ABPA), chronic rhinosinusitis with nasal polyps (CRSwNP), chronic rhinosinusitis without nasal polyps (CRSsNP), allergic rhinitis, allergic conjunctivitis, vernal keratoconjunctivitis, food allergies, alpha galactosidase syndrome, pollen-food allergy syndrome/oral allergy syndrome (OAS), acute allergen exposure, human seminal fluid hypersensitivity, anaphylaxis, hypersensitivity, allergy, latex allergy, occupational exposure to skin mucosa and lung sensitizing agents and allergens, mastocytosis, mast cell activation disorders, prevention of drug-induced immediate hypersensitivity, drug desensitization (e.g., chemotherapy), allergen immunotherapy desensitization, eosinophilic granulomatosis with polyangiitis (EGPA)/Churg-Strauss, hyper-IgE syndrome (HIES), or any combination thereof. In some embodiments, the subject is a subject in need thereof.

### BRIEF DESCRIPTION OF DRAWINGS

[0013] FIG. 1 shows cleaving performance of polypeptides having IgE protease activity against IgE or IgG1.

[0014] FIGS. 2A-2C show exemplary sequence alignments.

[0015] FIG. 3 illustrates exemplary molecules.

[0016] FIGS. 4A-4C show exemplary IgE protease sequence alignments.

### DETAILED DESCRIPTION

[0017] As used herein and in the appended claims, the singular forms “a”, “an” and “the” include plural reference unless the context clearly dictates otherwise.

[0018] As used herein, the term “about” means that the numerical value is approximate and small variations would not significantly affect the practice of the disclosed embodiments. Where a numerical limitation is used, unless indicated otherwise by the context, “about” means the numerical value can vary by ±5% and remain within the scope of the disclosed embodiments. Thus, about 100 means 95 to 105.

[0019] As used herein, the term “animal” includes, but is not limited to, humans and non-human vertebrates such as wild, domestic, and farm animals. As used herein, the term “mammal” means a rodent (i.e., a mouse, a rat, or a guinea pig), a monkey, a cat, a dog, a cow, a horse, a pig, or a human. In some embodiments, the mammal is a human.

[0020] As used herein, the term “contacting” means bringing together of two elements in an in vitro system or an in vivo system. For example, “contacting” a therapeutic compound with an individual or patient or cell includes the administration of the compound to an individual or patient, such as a human, as well as, for example, introducing a compound into a sample containing a cellular or purified preparation containing target.

[0021] As used herein, the terms “comprising” (and any form of comprising, such as “comprise”, “comprises”, and “comprised”), “having” (and any form of having, such as “have” and “has”), “including” (and any form of including, such as “includes” and “include”), or “containing” (and any form of containing, such as “contains” and “contain”), are inclusive or open-ended and do not exclude additional, unrecited elements or method steps. Any composition or method that recites the term “comprising” should also be understood to also describe such compositions as consisting, consisting of, or consisting essentially of the recited components or elements.

[0022] As used herein, the term “fused” or “linked” when used in reference to a protein or molecule having different domains or heterologous sequences means that the protein domains are part of the same peptide chain that are connected to one another with either peptide bonds or other covalent bonding. The domains or section can be linked or fused directly to one another or another domain or peptide sequence can be between the two domains or sequences and such sequences would still be considered to be fused or linked to one another.

[0023] As used herein, the term “individual,” “subject,” or “patient,” used interchangeably, means any animal, including mammals, such as mice, rats, other rodents, rabbits, dogs, cats, swine, cattle, sheep, horses, or primates, such as humans.

[0024] As used herein, the term “inhibit” refers to a result, symptom, or activity being reduced as compared to the activity or result in the absence of the compound that is inhibiting the result, symptom, or activity. In some embodiments, the result, symptom, or activity, is inhibited by about, or, at least, 10%, 20%, 30%, 40%, 50%, 60%, 70%, 80%, 90%, 95%, or 99%. An result, symptom, or activity can also be inhibited if it is completely elimination or extinguished.

[0025] As used herein, the phrase “in need thereof” means that the subject has been identified as having a need for the particular method or treatment. In some embodiments, the identification can be by any means of diagnosis. In any of the methods and treatments described herein, the subject can be in need thereof. In some embodiments, the subject is in an environment or will be traveling to an environment in which a particular disease, disorder, or condition is prevalent.

[0026] As used herein, the phrase “integer from X to Y” means any integer that includes the endpoints. For example, the phrase “integer from 1 to 5” means 1, 2, 3, 4, or 5.

[0027] As used herein, the phrase “ophthalmically acceptable” means having no persistent detrimental effect on the treated eye or the functioning thereof, or on the general health of the subject being treated. However, it will be recognized that transient effects such as minor irritation or a “stinging” sensation are common with topical ophthalmic administration of drugs and the existence of such transient effects is not inconsistent with the composition, formulation, or ingredient (e.g., excipient) in question being “ophthalmically acceptable” as herein defined. In some embodiments, the pharmaceutical compositions can be ophthalmically acceptable or suitable for ophthalmic administration.

[0028] In some embodiments, the term “therapeutic molecule” can be used interchangeably with “therapeutic compound,” “molecule,” or “therapeutic,” and refers to any polypeptide, or protein described herein.

[0029] As used herein, the term “position,” is meant to refer to a location in the sequence of a polypeptide. Positions may be numbered sequentially, or according to an established format, for example the EU numbering system based on Kabat's amino acid positions. For example, position 298 is a position in the human antibody IgG1.

[0030] “Specific binding” or “specifically binds to” or is “specific for” a particular antigen, target, or an epitope means binding that is measurably different from a non-specific interaction. Specific binding can be measured, for example, by determining binding of a molecule compared to binding of a control molecule, which generally is a molecule of similar structure that does not have binding activity. For example, specific binding can be determined by competition with a control molecule that is similar to the target.

[0031] Specific binding for a particular antigen, target, or an epitope can be exhibited, for example, by an antibody having a K_{D} for an antigen or epitope of at least about 10^{-4M}, at least about 10^{-5M}, at least about 10^{-6M}, at least about 10^{-7M}, at least about 10^{-8M}, at least about 10^{-9M}, alternatively at least about 10^{-10M}, at least about 10^{-11M}, at least about 10^{-12M}, or greater, where K_{D} refers to a dissociation rate of a particular antibody-target interaction. Typically, an antibody that specifically binds an antigen or target will have a K_{D} that is, or at least, 2-, 4-, 5-, 10-, 20-, 50-, 100-, 500-, 1000-, 5,000-, 10,000-, or more times greater for a control molecule relative to the antigen or epitope.

[0032] In some embodiments, specific binding for a particular antigen, target, or an epitope can be exhibited, for example, by an antibody having a K_{A} or Kₐ for a target, antigen, or epitope of at least 2-, 4-, 5-, 20-, 50-, 100-, 500-, 1000-, 5,000-, 10,000- or more times greater for the target, antigen, or epitope relative to a control, where K_{A} or Kₐ refers to an association rate of a particular antibody-antigen interaction.

[0033] As provided herein, the compounds and compositions provided for herein can be used in methods of treatment as provided herein. As used herein, the terms “treat,” “treated,” or “treating” mean both therapeutic treatment and prophylactic measures wherein the object is to slow down (lessen) an undesired physiological condition, disorder or disease, or obtain beneficial or desired clinical results. For purposes of these embodiments, beneficial or desired clinical results include, but are not limited to, alleviation of symptoms; diminishment of extent of condition, disorder or disease; stabilized (i.e., not worsening) state of condition, disorder or disease; delay in onset or slowing of condition, disorder or disease progression; amelioration of the condition, disorder or disease state or remission (whether partial or total), whether detectable or undetectable; an amelioration of at least one measurable physical parameter, not necessarily discernible by the patient; or enhancement or improvement of condition, disorder or disease. Treatment includes eliciting a clinically significant response without excessive levels of side effects. Treatment also includes prolonging survival, as applicable for a specific disease, as compared to expected survival if not receiving treatment. Thus, “treatment of an autoimmune condition” or “treating autoimmunity” means an activity that alleviates or ameliorates any of the primary phenomena or secondary symptoms associated with the autoimmune condition other condition described herein when the terms “treat,” “treated,” or “treating” are used in conjunction with such condition.

[0034] As used herein, terms “variant,” “molecule,” “therapeutic,” “therapeutic compound,” “compound,” “polypeptide,” or “protein” can be used interchangeably and relate to the variants, molecules, therapeutics, therapeutic compounds, compounds, polypeptides, and proteins disclosed herein.

### Protease Variants

[0035] Prior to the present disclosure, immunoglobulin proteases that could cleave IgE or selectively IgE were not known. The present disclosure provides for the surprising and unexpected embodiments of immunoglobulin proteases that can cleave IgE and selectively cleave IgE. The present disclosure provides for polypeptides, molecules, compounds, therapeutics, and compositions comprising a polypeptide having protease activity. In some embodiments, the polypeptide having protease activity is capable of cleaving an immunoglobulin. In some embodiments, the polypeptide having protease activity is capable of cleaving an immunoglobulin E (IgE).

[0036] In some embodiments, the polypeptide having protease activity is a variant of a naturally occurring protease.

[0037] In some embodiments, the polypeptide having protease activity has an amino acid sequence having at least 50%, at least 51%, at least 52%, at least 53%, at least 54%, at least 55%, at least 56%, at least 57%, at least 58%, at least 59%, at least 60%, at least 61%, at least 62%, at least 63%, at least 64%, at least 65%, at least 66%, at least 67%, at least 68%, at least 69%, at least 70%, at least 71%, at least 72%, at least 73%, at least 74%, at least 75%, at least 76%, at least 77%, at least 78%, at least 79%, at least 80%, at least 81%, at least 82%, at least 83%, at least 84%, at least 85%, at least 86%, at least 87%, at least 88%, at least 89%, at least 90%, at least 91%, at least 92%, at least 93%, at least 94%, at least 95%, at least 96%, at least 97%, at least 98%, or at least 99% identity to:

(SEQ ID NO: 1)
MKKQSFTHSRKPKFGMRKLSIGLASCMLGMMFLTTGHVNADDVDHVGE
TITVVPWQRNNLDTALGRRKAEDRIKETLWADGVKIDEKDFEHIKSSH
EDYFAVEYGKGSGYYDVNKKMDSEDTALCVGSVVTNMFHWWVDQNREN
IEKFKKQDLENNGVMKFNGVKEATVDELNHFYKEYQSNKYADQSRFFD
LIKKHFGNKALNPEELFELYFNGFYYNSSHRYIEDNKPAQNNLFSKVL
ENNKLLNPERSYGIDGFSNNVINALKSHKVLGLVHTTPLRYRHIISMW
GADIDQDGKVKAIYVTDSDDREITFNDNSKRRIGMKRYDVLVDDFGNI
RFTGKGATHKEEGAIYAGLYSLSRGDEVWEDYFKKYPEVQENLENNVA
DSNKNSEDVEVSSVEFDFLNFKYPKNEDQVSTEDMRLTLKDTNVFNQP
QVKISFEEQNGNDWKEKDSGTFEEGKKYRLKIDVNKLALKIYGHLSKN
KLNVIVNGKAVNIQNVVKKDSIETSFTIYSDSIDLEKINYWTDSFNNW
S.

[0038] In some embodiments, the polypeptide having protease activity is a size variant of SEQ ID NO: 1. Thus, in some embodiments, the polypeptide having protease activity comprises amino acids X1-X2 of SEQ ID NO: 1, wherein X1 and X2 denote the amino acid position, or a range of positions of SEQ ID NO: 1. Accordingly, in some embodiments, the polypeptide having protease activity comprises amino acids 62-379 of SEQ ID NO: 1. in some embodiments, the polypeptide having protease activity comprises amino acids 53-379 of SEQ ID NO: 1.

[0039] In some embodiments, the polypeptide having protease activity does not comprise the contiguous amino acid residues 1-52 or 1-61 of SEQ ID NO: 1 or any contiguous 5-10 peptide fragment contained therein. In some embodiments, the polypeptide having protease activity does not comprise the contiguous amino acid residues 1-60, 1-55, or 1-50 of SEQ ID NO: 1. In some embodiments, the polypeptide having protease activity does not comprise the contiguous amino acid residues 1-60, 1-59, 1-58, 1-57, 1-56, 1-55, 1-54, 1-53, 1-52, 1-51, or 1-50 of SEQ ID NO: 1. These deletions can be illustrated by the notation of the “first residue_second residuedel”. For example, the notation “1_61del” in reference to SEQ ID NO: 1 means that the first 61 amino acid residues of SEQ ID NO: 1 are not present in the polypeptide. Thus, in some embodiments, the polypeptide having protease activity does not comprise the contiguous amino acid sequence MKKQSFTHSRKPKFGMRKLSIGLASCMLGMMFLTTGHVNADDVDHVGETITVVPWQR NNLD (SEQ ID NO: 248) in its entirety. In some embodiments, the polypeptide having protease activity does not comprise the contiguous amino acid sequence MKKQSFTHSRKPKFGMRKLSIGLASCMLGMMFLTTGHVNADDVDHVGETITV (SEQ ID NO: 249) in its entirety.

[0040] In some embodiments, the polypeptide having protease activity does not comprise the contiguous amino acid residues 380-529 (380_529del) of SEQ ID NO: 1. In some embodiments, the polypeptide having protease activity does not comprise the contiguous amino acid residues 380-520, 380-510, 380-500, 380-490, or 380-480 of SEQ ID NO: 1

[0041] In some embodiments, the polypeptide having protease activity has an amino acid sequence having at least 50%, at least 51%, at least 52%, at least 53%, at least 54%, at least 55%, at least 56%, at least 57%, at least 58%, at least 59%, at least 60%, at least 61%, at least 62%, at least 63%, at least 64%, at least 65%, at least 66%, at least 67%, at least 68%, at least 69%, at least 70%, at least 71%, at least 72%, at least 73%, at least 74%, at least 75%, at least 76%, at least 77%, at least 78%, at least 79%, at least 80%, at least 81%, at least 82%, at least 83%, at least 84%, at least 85%, at least 86%, at least 87%, at least 88%, at least 89%, at least 90%, at least 91%, at least 92%, at least 93%, at least 94%, at least 95%, at least 96%, at least 97%, at least 98%, or at least 99% identity to amino acids 62-379 of SEQ ID NO: 1. In some embodiments, the polypeptide having protease activity has an amino acid sequence having at least 50%, at least 51%, at least 52%, at least 53%, at least 54%, at least 55%, at least 56%, at least 57%, at least 58%, at least 59%, at least 60%, at least 61%, at least 62%, at least 63%, at least 64%, at least 65%, at least 66%, at least 67%, at least 68%, at least 69%, at least 70%, at least 71%, at least 72%, at least 73%, at least 74%, at least 75%, at least 76%, at least 77%, at least 78%, at least 79%, at least 80%, at least 81%, at least 82%, at least 83%, at least 84%, at least 85%, at least 86%, at least 87%, at least 88%, at least 89%, at least 90%, at least 91%, at least 92%, at least 93%, at least 94%, at least 95%, at least 96%, at least 97%, at least 98%, or at least 99% identity to amino acids 62-379 of SEQ ID NO: 1, provided that the amino acid sequence does not comprises amino acids 1-61 and/or 380-529 of SEQ ID NO: 1 or other deletions as provided for herein.

[0042] In some embodiments, the polypeptide having protease activity has an amino acid sequence having at least 50%, at least 51%, at least 52%, at least 53%, at least 54%, at least 55%, at least 56%, at least 57%, at least 58%, at least 59%, at least 60%, at least 61%, at least 62%, at least 63%, at least 64%, at least 65%, at least 66%, at least 67%, at least 68%, at least 69%, at least 70%, at least 71%, at least 72%, at least 73%, at least 74%, at least 75%, at least 76%, at least 77%, at least 78%, at least 79%, at least 80%, at least 81%, at least 82%, at least 83%, at least 84%, at least 85%, at least 86%, at least 87%, at least 88%, at least 89%, at least 90%, at least 91%, at least 92%, at least 93%, at least 94%, at least 95%, at least 96%, at least 97%, at least 98%, or at least 99% identity to amino acids 53-379 of SEQ ID NO: 1. In some embodiments, the polypeptide having protease activity has an amino acid sequence having at least 50%, at least 51%, at least 52%, at least 53%, at least 54%, at least 55%, at least 56%, at least 57%, at least 58%, at least 59%, at least 60%, at least 61%, at least 62%, at least 63%, at least 64%, at least 65%, at least 66%, at least 67%, at least 68%, at least 69%, at least 70%, at least 71%, at least 72%, at least 73%, at least 74%, at least 75%, at least 76%, at least 77%, at least 78%, at least 79%, at least 80%, at least 81%, at least 82%, at least 83%, at least 84%, at least 85%, at least 86%, at least 87%, at least 88%, at least 89%, at least 90%, at least 91%, at least 92%, at least 93%, at least 94%, at least 95%, at least 96%, at least 97%, at least 98%, or at least 99% identity to amino acids 62-379 of SEQ ID NO: 1, provided that the amino acid sequence does not comprises amino acids 1-52 and/or 380-529 of SEQ ID NO: 1, or other deletions as provided for herein.

[0043] In some embodiments, the polypeptide having protease activity has an amino acid sequence having at least 50%, at least 51%, at least 52%, at least 53%, at least 54%, at least 55%, at least 56%, at least 57%, at least 58%, at least 59%, at least 60%, at least 61%, at least 62%, at least 63%, at least 64%, at least 65%, at least 66%, at least 67%, at least 68%, at least 69%, at least 70%, at least 71%, at least 72%, at least 73%, at least 74%, at least 75%, at least 76%, at least 77%, at least 78%, at least 79%, at least 80%, at least 81%, at least 82%, at least 83%, at least 84%, at least 85%, at least 86%, at least 87%, at least 88%, at least 89%, at least 90%, at least 91%, at least 92%, at least 93%, at least 94%, at least 95%, at least 96%, at least 97%, at least 98%, or at least 99% identity to SEQ ID NO: 3. In some embodiments, the polypeptide having protease activity has an amino acid sequence having at least 50%, at least 51%, at least 52%, at least 53%, at least 54%, at least 55%, at least 56%, at least 57%, at least 58%, at least 59%, at least 60%, at least 61%, at least 62%, at least 63%, at least 64%, at least 65%, at least 66%, at least 67%, at least 68%, at least 69%, at least 70%, at least 71%, at least 72%, at least 73%, at least 74%, at least 75%, at least 76%, at least 77%, at least 78%, at least 79%, at least 80%, at least 81%, at least 82%, at least 83%, at least 84%, at least 85%, at least 86%, at least 87%, at least 88%, at least 89%, at least 90%, at least 91%, at least 92%, at least 93%, at least 94%, at least 95%, at least 96%, at least 97%, at least 98%, or at least 99% identity to SEQ ID NO: 3, provided that the amino acid sequence does not comprises amino acids 1-61 and/or 380-529 of SEQ ID NO: 1.

[0044] In some embodiments, the polypeptide having protease activity has an amino acid sequence having at least 50%, at least 51%, at least 52%, at least 53%, at least 54%, at least 55%, at least 56%, at least 57%, at least 58%, at least 59%, at least 60%, at least 61%, at least 62%, at least 63%, at least 64%, at least 65%, at least 66%, at least 67%, at least 68%, at least 69%, at least 70%, at least 71%, at least 72%, at least 73%, at least 74%, at least 75%, at least 76%, at least 77%, at least 78%, at least 79%, at least 80%, at least 81%, at least 82%, at least 83%, at least 84%, at least 85%, at least 86%, at least 87%, at least 88%, at least 89%, at least 90%, at least 91%, at least 92%, at least 93%, at least 94%, at least 95%, at least 96%, at least 97%, at least 98%, or at least 99% identity to SEQ ID NO: 4. In some embodiments, the polypeptide having protease activity has an amino acid sequence having at least 50%, at least 51%, at least 52%, at least 53%, at least 54%, at least 55%, at least 56%, at least 57%, at least 58%, at least 59%, at least 60%, at least 61%, at least 62%, at least 63%, at least 64%, at least 65%, at least 66%, at least 67%, at least 68%, at least 69%, at least 70%, at least 71%, at least 72%, at least 73%, at least 74%, at least 75%, at least 76%, at least 77%, at least 78%, at least 79%, at least 80%, at least 81%, at least 82%, at least 83%, at least 84%, at least 85%, at least 86%, at least 87%, at least 88%, at least 89%, at least 90%, at least 91%, at least 92%, at least 93%, at least 94%, at least 95%, at least 96%, at least 97%, at least 98%, or at least 99% identity to SEQ ID NO: 4, provided that the amino acid sequence does not comprises amino acids 1-52 and/or 380-529 of SEQ ID NO: 1.

[0045] In some embodiments, the polypeptide having protease activity has an amino acid sequence having at least 50%, at least 51%, at least 52%, at least 53%, at least 54%, at least 55%, at least 56%, at least 57%, at least 58%, at least 59%, at least 60%, at least 61%, at least 62%, at least 63%, at least 64%, at least 65%, at least 66%, at least 67%, at least 68%, at least 69%, at least 70%, at least 71%, at least 72%, at least 73%, at least 74%, at least 75%, at least 76%, at least 77%, at least 78%, at least 79%, at least 80%, at least 81%, at least 82%, at least 83%, at least 84%, at least 85%, at least 86%, at least 87%, at least 88%, at least 89%, at least 90%, at least 91%, at least 92%, at least 93%, at least 94%, at least 95%, at least 96%, at least 97%, at least 98%, or at least 99% identity to:

(SEQ ID NO: 2)
MRKLSIGLASCMLGMMFLTTSHVSGEVVEVWPYGQNPHSGTIGVDPGQ
QNLDTALGRRKAEERIKETLWVDGVKIDEKDFEHMSSSHEDYFAAEYG
KGSGYYDVNKKMDSGDSALCVASVVTNMFHWWVDQNRDNIEKFKKQDI
ENNGVMKFNGVRQTTVDELNHFYKEYNSNKYADQSKFFDLIKSHFGNR
ALNPEELFELYFNGFYYNSSQRYIEDNKPAQNNLFSKVLENNKLLNPE
RSYGIDGFSNNVINALKSHKVLGLVHTTPLRYRHIISMWGADIDQDGK
VKAIYVTDSDDREITFNDNSKRRIGMKRYDVLVDDFGNIRFTGKGATH
KEEGAIYAGLYSLSRGDEVWEDYFKKYPEVQENLENNVADSNKNSEDV
EVSSVEFDFLNFKYPKNEDQVSTEDMRLTLKDTNVFNQPQVKISFEEQ
NGNDWKEKDSGTFEEGKKYRLKIDVNKLALKIYGHLSKNKLNVIVNGK
AVNIQNVVKKDSIETSFTIYSDSIDLEKINYWTDSFNNWS.

[0046] In some embodiments, the polypeptide having protease activity is a size variant of SEQ ID NO: 1. Thus, in some embodiments, the polypeptide having protease activity comprises amino acids X1-X2 of SEQ ID NO: 2, wherein X1 and X2 denote the amino acid position, or a range of positions of SEQ ID NO: 2. Accordingly, in some embodiments, the polypeptide having protease activity comprises amino acids 51-370 of SEQ ID NO: 2.

[0047] In some embodiments, the polypeptide having protease activity has an amino acid sequence having at least 50%, at least 51%, at least 52%, at least 53%, at least 54%, at least 55%, at least 56%, at least 57%, at least 58%, at least 59%, at least 60%, at least 61%, at least 62%, at least 63%, at least 64%, at least 65%, at least 66%, at least 67%, at least 68%, at least 69%, at least 70%, at least 71%, at least 72%, at least 73%, at least 74%, at least 75%, at least 76%, at least 77%, at least 78%, at least 79%, at least 80%, at least 81%, at least 82%, at least 83%, at least 84%, at least 85%, at least 86%, at least 87%, at least 88%, at least 89%, at least 90%, at least 91%, at least 92%, at least 93%, at least 94%, at least 95%, at least 96%, at least 97%, at least 98%, or at least 99% identity to amino acids 51-370 of SEQ ID NO: 2. In some embodiments, the polypeptide having protease activity has an amino acid sequence having at least 50%, at least 51%, at least 52%, at least 53%, at least 54%, at least 55%, at least 56%, at least 57%, at least 58%, at least 59%, at least 60%, at least 61%, at least 62%, at least 63%, at least 64%, at least 65%, at least 66%, at least 67%, at least 68%, at least 69%, at least 70%, at least 71%, at least 72%, at least 73%, at least 74%, at least 75%, at least 76%, at least 77%, at least 78%, at least 79%, at least 80%, at least 81%, at least 82%, at least 83%, at least 84%, at least 85%, at least 86%, at least 87%, at least 88%, at least 89%, at least 90%, at least 91%, at least 92%, at least 93%, at least 94%, at least 95%, at least 96%, at least 97%, at least 98%, or at least 99% identity to amino acids 51-370 of SEQ ID NO: 2, provided that the amino acid sequence does not comprises amino acids 1-50 and/or 371-520 of SEQ ID NO: 2.

[0048] In some embodiments, a polypeptide having protease activity does not comprise mutations to amino acids responsible for binding to an immunoglobulin, or amino acids responsible for the protease activity of the polypeptide. In some embodiments, a polypeptide having protease activity does not comprise mutations to amino acids responsible for binding to an IgE. In some embodiments, a polypeptide having protease activity does not comprise mutations to amino acids responsible for the IgE protease activity of the polypeptide.

[0049] In some embodiments, a polypeptide having protease activity comprises an amino acid sequence such as those provided herein. In some embodiments, the amino acid sequence comprises residues at position that correspond to positions in SEQ ID NO: 1, when the two, or more, amino acid sequences are aligned. For example, a position in SEQ ID NO: 3 may corresponds to a position in SEQ ID NO: 1, as shown in FIG. 2B alignment. In another embodiment, a position in SEQ ID NO: 4 may corresponds to a position in SEQ ID NO: 1, as shown in FIG. 2C alignment. Thus, in some embodiments, position 1 in SEQ ID NO: 3 corresponds to position 62 in SEQ ID NO: 1; position 2 in SEQ ID NO: 3 corresponds to position 63 in SEQ ID NO: 1; and so forth, as shown in FIG. 2B alignment. In some embodiments, position 1 in SEQ ID NO: 4 corresponds to position 53 in SEQ ID NO: 1; position 2 in SEQ ID NO: 4 corresponds to position 54 in SEQ ID NO: 1; and so forth, as shown in FIG. 2C alignment.

[0050] In some embodiments, position 71 in SEQ ID NO: 1 corresponds to position 10 in SEQ ID NO: 3. In some embodiments, position 79 in SEQ ID NO: 1 corresponds to position 18 in SEQ ID NO: 3. In some embodiments, position 93 in SEQ ID NO: 1 corresponds to position 32 in SEQ ID NO: 3. In some embodiments, position 102 in SEQ ID NO: 1 corresponds to position 41 in SEQ ID NO: 3. In some embodiments, position 120 in SEQ ID NO: 1 corresponds to position 59 in SEQ ID NO: 3. In some embodiments, position 122 in SEQ ID NO: 1 corresponds to position 61 in SEQ ID NO: 3. In some embodiments, position 125 in SEQ ID NO: 1 corresponds to position 64 in SEQ ID NO: 3. In some embodiments, position 126 in SEQ ID NO: 1 corresponds to position 65 in SEQ ID NO: 3. In some embodiments, position 128 in SEQ ID NO: 1 corresponds to position 67 in SEQ ID NO: 3. In some embodiments, position 153 in SEQ ID NO: 1 corresponds to position 92 in SEQ ID NO: 3. In some embodiments, position 160 in SEQ ID NO: 1 corresponds to position 99 in SEQ ID NO: 3. In some embodiments, position 162 in SEQ ID NO: 1 corresponds to position 101 in SEQ ID NO: 3. In some embodiments, position 165 in SEQ ID NO: 1 corresponds to position 104 in SEQ ID NO: 3. In some embodiments, position 166 in SEQ ID NO: 1 corresponds to position 105 in SEQ ID NO: 3. In some embodiments, position 167 in SEQ ID NO: 1 corresponds to position 106 in SEQ ID NO: 3. In some embodiments, position 189 in SEQ ID NO: 1 corresponds to position 128 in SEQ ID NO: 3. In some embodiments, position 195 in SEQ ID NO: 1 corresponds to position 134 in SEQ ID NO: 3. In some embodiments, position 196 in SEQ ID NO: 1 corresponds to position 135 in SEQ ID NO: 3. In some embodiments, position 197 in SEQ ID NO: 1 corresponds to position 136 in SEQ ID NO: 3. In some embodiments, position 201 in SEQ ID NO: 1 corresponds to position 140 in SEQ ID NO: 3. In some embodiments, position 212 in SEQ ID NO: 1 corresponds to position 151 in SEQ ID NO: 3. In some embodiments, position 222 in SEQ ID NO: 1 corresponds to position 161 in SEQ ID NO: 3. In some embodiments, position 229 in SEQ ID NO: 1 corresponds to position 168 in SEQ ID NO: 3. In some embodiments, position 280 in SEQ ID NO: 1 corresponds to position 219 in SEQ ID NO: 3. In some embodiments, position 283 in SEQ ID NO: 1 corresponds to position 222 in SEQ ID NO: 3. In some embodiments, position 305 in SEQ ID NO: 1 corresponds to position 244 in SEQ ID NO: 3. In some embodiments, position 309 in SEQ ID NO: 1 corresponds to position 248 in SEQ ID NO: 3. In some embodiments, position 310 in SEQ ID NO: 1 corresponds to position 249 in SEQ ID NO: 3. In some embodiments, position 318 in SEQ ID NO: 1 corresponds to position 257 in SEQ ID NO: 3. In some embodiments, position 319 in SEQ ID NO: 1 corresponds to position 258 in SEQ ID NO: 3. In some embodiments, position 320 in SEQ ID NO: 1 corresponds to position 259 in SEQ ID NO: 3. In some embodiments, position 324 in SEQ ID NO: 1 corresponds to position 263 in SEQ ID NO: 3. In some embodiments, position 333 in SEQ ID NO: 1 corresponds to position 272 in SEQ ID NO: 3.

[0051] In some embodiments, position 125 in SEQ ID NO: 1 corresponds to position 73 in SEQ ID NO: 4. In some embodiments, position 283 in SEQ ID NO: 1 corresponds to position 231 in SEQ ID NO: 4. In some embodiments, position 283 in SEQ ID NO: 1 corresponds to position 253 in SEQ ID NO: 4. In some embodiments, position 122 in SEQ ID NO: 1 corresponds to position 70 in SEQ ID NO: 4. In some embodiments, position 128 in SEQ ID NO: 1 corresponds to position 76 in SEQ ID NO: 4. In some embodiments, position 153 in SEQ ID NO: 1 corresponds to position 101 in SEQ ID NO: 4.

[0052] In some embodiments, a polypeptide having protease activity comprises a cysteine (C) at a position in the polypeptide that corresponds to position 125 of SEQ ID NO: 1, a histidine (H) at a position in the polypeptide that corresponds to position 283 of SEQ ID NO: 1, and/or an aspartic acid (D) at a position in the polypeptide that corresponds to position 305 of SEQ ID NO: 1. In some embodiments, a polypeptide having protease activity comprises a cysteine (C) at a position in the polypeptide that corresponds to position 125 of SEQ ID NO: 1. In some embodiments, a polypeptide having protease activity comprises a histidine (H) at a position in the polypeptide that corresponds to position 283 of SEQ ID NO: 1. In some embodiments, a polypeptide having protease activity comprises an aspartic acid (D) at a position in the polypeptide that corresponds to position 305 of SEQ ID NO: 1. In some embodiments, a polypeptide having protease activity comprises a cysteine (C) at a position in the polypeptide that corresponds to position 125 of SEQ ID NO: 1, and a histidine (H) at a position in the polypeptide that corresponds to position 283 of SEQ ID NO: 1. In some embodiments, a polypeptide having protease activity comprises a cysteine (C) at a position in the polypeptide that corresponds to position 125 of SEQ ID NO: 1, and an aspartic acid (D) at a position in the polypeptide that corresponds to position 305 of SEQ ID NO: 1. In some embodiments, a polypeptide having protease activity comprises a histidine (H) at a position in the polypeptide that corresponds to position 283 of SEQ ID NO: 1, and an aspartic acid (D) at a position in the polypeptide that corresponds to position 305 of SEQ ID NO: 1. In some embodiments, a polypeptide having protease activity comprises a cysteine (C) at a position in the polypeptide that corresponds to position 125 of SEQ ID NO: 1, a histidine (H) at a position in the polypeptide that corresponds to position 283 of SEQ ID NO: 1, and an aspartic acid (D) at a position in the polypeptide that corresponds to position 305 of SEQ ID NO: 1.

[0053] In some embodiments, a cysteine (C) at a position 125 in SEQ ID NO: 1 corresponds to a cysteine (C) at position 64 in SEQ ID NO: 3. In some embodiments, a histidine (H) at a position 283 in SEQ ID NO: 1 corresponds to a histidine (H) at position 222 in SEQ ID NO: 3. In some embodiments, an aspartic acid (D) at a position 305 in SEQ ID NO: 1 corresponds to an aspartic acid (D) at position 244 in SEQ ID NO: 3.

[0054] In some embodiments, a cysteine (C) at a position 125 in SEQ ID NO: 1 corresponds to a cysteine (C) at position 73 in SEQ ID NO: 4. In some embodiments, a histidine (H) at a position 283 in SEQ ID NO: 1 corresponds to a histidine (H) at position 231 in SEQ ID NO: 4. In some embodiments, an aspartic acid (D) at a position 305 in SEQ ID NO: 1 corresponds to an aspartic acid (D) at position 253 in SEQ ID NO: 4.

[0055] In some embodiments, a polypeptide having protease activity comprises a cysteine (C) at a position in the polypeptide that corresponds to position 125 of SEQ ID NO: 1, a histidine (H) at a position in the polypeptide that corresponds to position 283 of SEQ ID NO: 1, an aspartic acid (D) at a position in the polypeptide that corresponds to position 305 of SEQ ID NO: 1, an aspartic acid (D) at a position in the polypeptide that corresponds to position 307 of SEQ ID NO: 1, and/or a lysine (K) at a position in the polypeptide that corresponds to position 115 of SEQ ID NO: 1. In some embodiments, a polypeptide having protease activity comprises a cysteine (C) at a position in the polypeptide that corresponds to position 125 of SEQ ID NO: 1, and a lysine (K) at a position in the polypeptide that corresponds to position 115 of SEQ ID NO: 1. In some embodiments, a polypeptide having protease activity comprises a cysteine (C) at a position in the polypeptide that corresponds to position 125 of SEQ ID NO: 1, a histidine (H) at a position in the polypeptide that corresponds to position 283 of SEQ ID NO: 1, and a lysine (K) at a position in the polypeptide that corresponds to position 115 of SEQ ID NO: 1. In some embodiments, a polypeptide having protease activity comprises a cysteine (C) at a position in the polypeptide that corresponds to position 125 of SEQ ID NO: 1, a histidine (H) at a position in the polypeptide that corresponds to position 283 of SEQ ID NO: 1, an aspartic acid (D) at a position in the polypeptide that corresponds to position 305 of SEQ ID NO: 1, and a lysine (K) at a position in the polypeptide that corresponds to position 115 of SEQ ID NO: 1. In some embodiments, a polypeptide having protease activity comprises a histidine (H) at a position in the polypeptide that corresponds to position 283 of SEQ ID NO: 1, an aspartic acid (D) at a position in the polypeptide that corresponds to position 305 of SEQ ID NO: 1, and a lysine (K) at a position in the polypeptide that corresponds to position 115 of SEQ ID NO: 1. In some embodiments, a polypeptide having protease activity comprises a cysteine (C) at a position in the polypeptide that corresponds to position 125 of SEQ ID NO: 1, and an aspartic acid (D) at a position in the polypeptide that corresponds to position 307 of SEQ ID NO: 1. In some embodiments, a polypeptide having protease activity comprises a cysteine (C) at a position in the polypeptide that corresponds to position 125 of SEQ ID NO: 1, a histidine (H) at a position in the polypeptide that corresponds to position 283 of SEQ ID NO: 1, and an aspartic acid (D) at a position in the polypeptide that corresponds to position 307 of SEQ ID NO: 1. In some embodiments, a polypeptide having protease activity comprises a cysteine (C) at a position in the polypeptide that corresponds to position 125 of SEQ ID NO: 1, a histidine (H) at a position in the polypeptide that corresponds to position 283 of SEQ ID NO: 1, an aspartic acid (D) at a position in the polypeptide that corresponds to position 305 of SEQ ID NO: 1, and an aspartic acid (D) at a position in the polypeptide that corresponds to position 307 of SEQ ID NO: 1. In some embodiments, a polypeptide having protease activity comprises a histidine (H) at a position in the polypeptide that corresponds to position 283 of SEQ ID NO: 1, an aspartic acid (D) at a position in the polypeptide that corresponds to position 305 of SEQ ID NO: 1, and an aspartic acid (D) at a position in the polypeptide that corresponds to position 307 of SEQ ID NO: 1. In some embodiments, a polypeptide having protease activity comprises a cysteine (C) at a position in the polypeptide that corresponds to position 125 of SEQ ID NO: 1, an aspartic acid (D) at a position in the polypeptide that corresponds to position 307 of SEQ ID NO: 1, and a lysine (K) at a position in the polypeptide that corresponds to position 115 of SEQ ID NO: 1. In some embodiments, a polypeptide having protease activity comprises a cysteine (C) at a position in the polypeptide that corresponds to position 125 of SEQ ID NO: 1, a histidine (H) at a position in the polypeptide that corresponds to position 283 of SEQ ID NO: 1, an aspartic acid (D) at a position in the polypeptide that corresponds to position 307 of SEQ ID NO: 1, and a lysine (K) at a position in the polypeptide that corresponds to position 115 of SEQ ID NO: 1. In some embodiments, a polypeptide having protease activity comprises a histidine (H) at a position in the polypeptide that corresponds to position 283 of SEQ ID NO: 1, an aspartic acid (D) at a position in the polypeptide that corresponds to position 305 of SEQ ID NO: 1, an aspartic acid (D) at a position in the polypeptide that corresponds to position 307 of SEQ ID NO: 1, and a lysine (K) at a position in the polypeptide that corresponds to position 115 of SEQ ID NO: 1. In some embodiments, a polypeptide having protease activity comprises a cysteine (C) at a position in the polypeptide that corresponds to position 125 of SEQ ID NO: 1, a histidine (H) at a position in the polypeptide that corresponds to position 283 of SEQ ID NO: 1, an aspartic acid (D) at a position in the polypeptide that corresponds to position 305 of SEQ ID NO: 1, an aspartic acid (D) at a position in the polypeptide that corresponds to position 307 of SEQ ID NO: 1, and a lysine (K) at a position in the polypeptide that corresponds to position 115 of SEQ ID NO: 1.

[0056] In some embodiments, the polypeptide having protease activity comprises at least one mutation at any position, wherein the positions correspond to SEQ ID NO: 1. In some embodiments, the polypeptide having protease activity comprises one or more mutations at any position selected from any one of position corresponding to position 68, 71, 75, 79, 84, 86, 88, 91, 93, 94, 102, 112, 115, 116, 117, 120, 122, 125, 126, 128, 139, 142, 143, 148, 149, 150, 152, 153, 160, 162, 164, 166, 167, 174, 175, 180, 181, 182, 183, 185, 189, 196, 197, 199, 200, 201, 202, 205, 206, 212, 219, 220, 221, 222, 224, 228, 229, 232, 233, 241, 242, 243, 244, 250, 251, 252, 254, 260, 262, 263, 268, 270, 271, 273, 274, 275, 276, 279, 280, 281, 282, 293, 294, 295, 297, 301, 303, 306, 307, 308, 309, 310, 311, 313, 314, 315, 316, 317, 318, 319, 320, 322, 323, 324, 326, 327, 329, 332, 333, 336, 343, 346, 347, 348, 351, 360, 363, 364, 366, 374, or 380 of SEQ ID NO: 1. 68 of SEQ ID NO: 1. In some embodiments, the polypeptide having protease activity comprises a mutation at a position corresponding to position 71 of SEQ ID NO: 1. In some embodiments, the polypeptide having protease activity comprises a mutation at a position corresponding to position 75 of SEQ ID NO: 1. In some embodiments, the polypeptide having protease activity comprises a mutation at a position corresponding to position 79 of SEQ ID NO: 1. In some embodiments, the polypeptide having protease activity comprises a mutation at a position corresponding to position 84 of SEQ ID NO: 1. In some embodiments, the polypeptide having protease activity comprises a mutation at a position corresponding to position 86 of SEQ ID NO: 1. In some embodiments, the polypeptide having protease activity comprises a mutation at a position corresponding to position 88 of SEQ ID NO: 1. In some embodiments, the polypeptide having protease activity comprises a mutation at a position corresponding to position 91 of SEQ ID NO: 1. In some embodiments, the polypeptide having protease activity comprises a mutation at a position corresponding to position 93 of SEQ ID NO: 1. In some embodiments, the polypeptide having protease activity comprises a mutation at a position corresponding to position 94 of SEQ ID NO: 1. In some embodiments, the polypeptide having protease activity comprises a mutation at a position corresponding to position 102 of SEQ ID NO: 1. In some embodiments, the polypeptide having protease activity comprises a mutation at a position corresponding to position 112 of SEQ ID NO: 1. In some embodiments, the polypeptide having protease activity comprises a mutation at a position corresponding to position 115 of SEQ ID NO: 1. In some embodiments, the polypeptide having protease activity comprises a mutation at a position corresponding to position 116 of SEQ ID NO: 1. In some embodiments, the polypeptide having protease activity comprises a mutation at a position corresponding to position 117 of SEQ ID NO: 1. In some embodiments, the polypeptide having protease activity comprises a mutation at a position corresponding to position 120 of SEQ ID NO: 1. In some embodiments, the polypeptide having protease activity comprises a mutation at a position corresponding to position 122 of SEQ ID NO: 1. In some embodiments, the polypeptide having protease activity comprises a mutation at a position corresponding to position 125 of SEQ ID NO: 1. In some embodiments, the polypeptide having protease activity comprises a mutation at a position corresponding to position 126 of SEQ ID NO: 1. In some embodiments, the polypeptide having protease activity comprises a mutation at a position corresponding to position 128 of SEQ ID NO: 1. In some embodiments, the polypeptide having protease activity comprises a mutation at a position corresponding to position 139 of SEQ ID NO: 1. In some embodiments, the polypeptide having protease activity comprises a mutation at a position corresponding to position 142 of SEQ ID NO: 1. In some embodiments, the polypeptide having protease activity comprises a mutation at a position corresponding to position 143 of SEQ ID NO: 1. In some embodiments, the polypeptide having protease activity comprises a mutation at a position corresponding to position 148 of SEQ ID NO: 1. In some embodiments, the polypeptide having protease activity comprises a mutation at a position corresponding to position 149 of SEQ ID NO: 1. In some embodiments, the polypeptide having protease activity comprises a mutation at a position corresponding to position 150 of SEQ ID NO: 1. In some embodiments, the polypeptide having protease activity comprises a mutation at a position corresponding to position 152 of SEQ ID NO: 1. In some embodiments, the polypeptide having protease activity comprises a mutation at a position corresponding to position 153 of SEQ ID NO: 1. In some embodiments, the polypeptide having protease activity comprises a mutation at a position corresponding to position 160 of SEQ ID NO: 1. In some embodiments, the polypeptide having protease activity comprises a mutation at a position corresponding to position 162 of SEQ ID NO: 1. In some embodiments, the polypeptide having protease activity comprises a mutation at a position corresponding to position 164 of SEQ ID NO: 1. In some embodiments, the polypeptide having protease activity comprises a mutation at a position corresponding to position 166 of SEQ ID NO: 1. In some embodiments, the polypeptide having protease activity comprises a mutation at a position corresponding to position 167 of SEQ ID NO: 1. In some embodiments, the polypeptide having protease activity comprises a mutation at a position corresponding to position 174 of SEQ ID NO: 1. In some embodiments, the polypeptide having protease activity comprises a mutation at a position corresponding to position 175 of SEQ ID NO: 1. In some embodiments, the polypeptide having protease activity comprises a mutation at a position corresponding to position 180 of SEQ ID NO: 1. In some embodiments, the polypeptide having protease activity comprises a mutation at a position corresponding to position 181 of SEQ ID NO: 1. In some embodiments, the polypeptide having protease activity comprises a mutation at a position corresponding to position 182 of SEQ ID NO: 1. In some embodiments, the polypeptide having protease activity comprises a mutation at a position corresponding to position 183 of SEQ ID NO: 1. In some embodiments, the polypeptide having protease activity comprises a mutation at a position corresponding to position 185 of SEQ ID NO: 1. In some embodiments, the polypeptide having protease activity comprises a mutation at a position corresponding to position 189 of SEQ ID NO: 1. In some embodiments, the polypeptide having protease activity comprises a mutation at a position corresponding to position 196 of SEQ ID NO: 1. In some embodiments, the polypeptide having protease activity comprises a mutation at a position corresponding to position 197 of SEQ ID NO: 1. In some embodiments, the polypeptide having protease activity comprises a mutation at a position corresponding to position 199 of SEQ ID NO: 1. In some embodiments, the polypeptide having protease activity comprises a mutation at a position corresponding to position 200 of SEQ ID NO: 1. In some embodiments, the polypeptide having protease activity comprises a mutation at a position corresponding to position 201 of SEQ ID NO: 1. In some embodiments, the polypeptide having protease activity comprises a mutation at a position corresponding to position 202 of SEQ ID NO: 1. In some embodiments, the polypeptide having protease activity comprises a mutation at a position corresponding to position 205 of SEQ ID NO: 1. In some embodiments, the polypeptide having protease activity comprises a mutation at a position corresponding to position 206 of SEQ ID NO: 1. In some embodiments, the polypeptide having protease activity comprises a mutation at a position corresponding to position 212 of SEQ ID NO: 1. In some embodiments, the polypeptide having protease activity comprises a mutation at a position corresponding to position 219 of SEQ ID NO: 1. In some embodiments, the polypeptide having protease activity comprises a mutation at a position corresponding to position 220 of SEQ ID NO: 1. In some embodiments, the polypeptide having protease activity comprises a mutation at a position corresponding to position 221 of SEQ ID NO: 1. In some embodiments, the polypeptide having protease activity comprises a mutation at a position corresponding to position 222 of SEQ ID NO: 1. In some embodiments, the polypeptide having protease activity comprises a mutation at a position corresponding to position 224 of SEQ ID NO: 1. In some embodiments, the polypeptide having protease activity comprises a mutation at a position corresponding to position 228 of SEQ ID NO: 1. In some embodiments, the polypeptide having protease activity comprises a mutation at a position corresponding to position 229 of SEQ ID NO: 1. In some embodiments, the polypeptide having protease activity comprises a mutation at a position corresponding to position 232 of SEQ ID NO: 1. In some embodiments, the polypeptide having protease activity comprises a mutation at a position corresponding to position 233 of SEQ ID NO: 1. In some embodiments, the polypeptide having protease activity comprises a mutation at a position corresponding to position 241 of SEQ ID NO: 1. In some embodiments, the polypeptide having protease activity comprises a mutation at a position corresponding to position 242 of SEQ ID NO: 1. In some embodiments, the polypeptide having protease activity comprises a mutation at a position corresponding to position 243 of SEQ ID NO: 1. In some embodiments, the polypeptide having protease activity comprises a mutation at a position corresponding to position 244 of SEQ ID NO: 1. In some embodiments, the polypeptide having protease activity comprises a mutation at a position corresponding to position 250 of SEQ ID NO: 1. In some embodiments, the polypeptide having protease activity comprises a mutation at a position corresponding to position 251 of SEQ ID NO: 1. In some embodiments, the polypeptide having protease activity comprises a mutation at a position corresponding to position 252 of SEQ ID NO: 1. In some embodiments, the polypeptide having protease activity comprises a mutation at a position corresponding to position 254 of SEQ ID NO: 1. In some embodiments, the polypeptide having protease activity comprises a mutation at a position corresponding to position 260 of SEQ ID NO: 1. In some embodiments, the polypeptide having protease activity comprises a mutation at a position corresponding to position 262 of SEQ ID NO: 1. In some embodiments, the polypeptide having protease activity comprises a mutation at a position corresponding to position 263 of SEQ ID NO: 1. In some embodiments, the polypeptide having protease activity comprises a mutation at a position corresponding to position 268 of SEQ ID NO: 1. In some embodiments, the polypeptide having protease activity comprises a mutation at a position corresponding to position 270 of SEQ ID NO: 1. In some embodiments, the polypeptide having protease activity comprises a mutation at a position corresponding to position 271 of SEQ ID NO: 1. In some embodiments, the polypeptide having protease activity comprises a mutation at a position corresponding to position 273 of SEQ ID NO: 1. In some embodiments, the polypeptide having protease activity comprises a mutation at a position corresponding to position 274 of SEQ ID NO: 1. In some embodiments, the polypeptide having protease activity comprises a mutation at a position corresponding to position 275 of SEQ ID NO: 1. In some embodiments, the polypeptide having protease activity comprises a mutation at a position corresponding to position 276 of SEQ ID NO: 1. In some embodiments, the polypeptide having protease activity comprises a mutation at a position corresponding to position 279 of SEQ ID NO: 1. In some embodiments, the polypeptide having protease activity comprises a mutation at a position corresponding to position 280 of SEQ ID NO: 1. In some embodiments, the polypeptide having protease activity comprises a mutation at a position corresponding to position 281 of SEQ ID NO: 1. In some embodiments, the polypeptide having protease activity comprises a mutation at a position corresponding to position 282 of SEQ ID NO: 1. In some embodiments, the polypeptide having protease activity comprises a mutation at a position corresponding to position 293 of SEQ ID NO: 1. In some embodiments, the polypeptide having protease activity comprises a mutation at a position corresponding to position 294 of SEQ ID NO: 1. In some embodiments, the polypeptide having protease activity comprises a mutation at a position corresponding to position 295 of SEQ ID NO: 1. In some embodiments, the polypeptide having protease activity comprises a mutation at a position corresponding to position 297 of SEQ ID NO: 1. In some embodiments, the polypeptide having protease activity comprises a mutation at a position corresponding to position 301 of SEQ ID NO: 1. In some embodiments, the polypeptide having protease activity comprises a mutation at a position corresponding to position 303 of SEQ ID NO: 1. In some embodiments, the polypeptide having protease activity comprises a mutation at a position corresponding to position 306 of SEQ ID NO: 1. In some embodiments, the polypeptide having protease activity comprises a mutation at a position corresponding to position 307 of SEQ ID NO: 1. In some embodiments, the polypeptide having protease activity comprises a mutation at a position corresponding to position 308 of SEQ ID NO: 1. In some embodiments, the polypeptide having protease activity comprises a mutation at a position corresponding to position 309 of SEQ ID NO: 1. In some embodiments, the polypeptide having protease activity comprises a mutation at a position corresponding to position 310 of SEQ ID NO: 1. In some embodiments, the polypeptide having protease activity comprises a mutation at a position corresponding to position 311 of SEQ ID NO: 1. In some embodiments, the polypeptide having protease activity comprises a mutation at a position corresponding to position 313 of SEQ ID NO: 1. In some embodiments, the polypeptide having protease activity comprises a mutation at a position corresponding to position 314 of SEQ ID NO: 1. In some embodiments, the polypeptide having protease activity comprises a mutation at a position corresponding to position 315 of SEQ ID NO: 1. In some embodiments, the polypeptide having protease activity comprises a mutation at a position corresponding to position 316 of SEQ ID NO: 1. In some embodiments, the polypeptide having protease activity comprises a mutation at a position corresponding to position 317 of SEQ ID NO: 1. In some embodiments, the polypeptide having protease activity comprises a mutation at a position corresponding to position 318 of SEQ ID NO: 1. In some embodiments, the polypeptide having protease activity comprises a mutation at a position corresponding to position 319 of SEQ ID NO: 1. In some embodiments, the polypeptide having protease activity comprises a mutation at a position corresponding to position 320 of SEQ ID NO: 1. In some embodiments, the polypeptide having protease activity comprises a mutation at a position corresponding to position 322 of SEQ ID NO: 1. In some embodiments, the polypeptide having protease activity comprises a mutation at a position corresponding to position 323 of SEQ ID NO: 1. In some embodiments, the polypeptide having protease activity comprises a mutation at a position corresponding to position 324 of SEQ ID NO: 1. In some embodiments, the polypeptide having protease activity comprises a mutation at a position corresponding to position 326 of SEQ ID NO: 1. In some embodiments, the polypeptide having protease activity comprises a mutation at a position corresponding to position 327 of SEQ ID NO: 1. In some embodiments, the polypeptide having protease activity comprises a mutation at a position corresponding to position 329 of SEQ ID NO: 1. In some embodiments, the polypeptide having protease activity comprises a mutation at a position corresponding to position 332 of SEQ ID NO: 1. In some embodiments, the polypeptide having protease activity comprises a mutation at a position corresponding to position 333 of SEQ ID NO: 1. In some embodiments, the polypeptide having protease activity comprises a mutation at a position corresponding to position 336 of SEQ ID NO: 1. In some embodiments, the polypeptide having protease activity comprises a mutation at a position corresponding to position 343 of SEQ ID NO: 1. In some embodiments, the polypeptide having protease activity comprises a mutation at a position corresponding to position 346 of SEQ ID NO: 1. In some embodiments, the polypeptide having protease activity comprises a mutation at a position corresponding to position 347 of SEQ ID NO: 1. In some embodiments, the polypeptide having protease activity comprises a mutation at a position corresponding to position 348 of SEQ ID NO: 1. In some embodiments, the polypeptide having protease activity comprises a mutation at a position corresponding to position 351 of SEQ ID NO: 1. In some embodiments, the polypeptide having protease activity comprises a mutation at a position corresponding to position 360 of SEQ ID NO: 1. In some embodiments, the polypeptide having protease activity comprises a mutation at a position corresponding to position 363 of SEQ ID NO: 1. In some embodiments, the polypeptide having protease activity comprises a mutation at a position corresponding to position 364 of SEQ ID NO: 1. In some embodiments, the polypeptide having protease activity comprises a mutation at a position corresponding to position 366 of SEQ ID NO: 1. In some embodiments, the polypeptide having protease activity comprises a mutation at a position corresponding to position 374 of SEQ ID NO: 1. In some embodiments, the polypeptide having protease activity comprises a mutation at a position corresponding to position 380 of SEQ ID NO: 1. In some embodiments, the polypeptide having protease activity comprises a mutation at a position corresponding to position of SEQ ID NO: 1.

[0057] In some embodiments, the polypeptide having protease activity comprises one or more mutations at positions selected from those in Table 1 below. In some embodiments, the mutation is a substitution, insertion, or deletion. Accordingly, in some embodiments, positions shown as “####delinsX” indicate deletion of a residue, or more residues, between positions indicated by “##” and insertion of sequence of “X”. In some embodiments, positions shown as “####X1delinsX2” indicate deletion of a sequence “X1” between positions indicated by “##” and insertion of sequence of “X2”.

TABLE 1
Sets of position as compared to SEQ ID NO: 1, that may comprise a mutation (such as,
but not limited to, a substitution, a deletion, or an insertion). Positions shown as “
XX_XX”, where XX indicates the position number, indicate a deletion and/or insertion.

| | | |
|---|---|---|
| 153, 189, 128 | 128, 153, 324, 333, 149, 262, | 128, 153, 162, 174, 199, 219, 229, 262, |
| | 276, 364, 205, 206, 250, 251 | 275, 324, 333, 177_183 |
| 153, 128, 333 | 128, 153, 324, 333, 149, 199, | 128, 153, 162, 174, 199, 219, 229, 275, |
| | 262, 276, 364 | 282, 324, 333, 177_183 |
| 122, 229 | 128, 153, 324, 333, 116, 149, | 93, 128, 150, 153, 162, 174, 199, 219, |
| | 182, 196, 262, 276, 364 | 229, 275, 282, 324, 333, 177_183 |
| 122, 153 | 128, 153, 324, 333, 94, 116, | 128, 139, 153, 162, 174, 199, 219, 229, |
| | 149, 182, 196, 262, 276, 336, | 241, 275, 282, 324, 333, 177_183 |
| | 364 | |
| 122, 153, 189 | 128, 153, 324, 333, 94, 116, | 128, 153, 162, 174, 199, 219, 229, 275, |
| | 149, 182, 196, 224, 262, 276, | 282, 324, 333, 343, 360, 177_183 |
| | 336, 364 | |
| 122, 153, 128 | 128, 153, 324, 333, 94, 116, | 128, 139, 153, 162, 174, 199, 219, 229, |
| | 149, 182, 196, 224, 262, 276, | 241, 275, 282, 324, 333, 343, 360, |
| | 281, 336, 364 | 177_183 |
| 122, 153, 126 | 128, 153, 324, 333, 94, 116, | 93, 128, 139, 150, 153, 162, 174, 199, |
| | 149, 182, 196, 224, 262, 276, | 219, 229, 241, 275, 282, 324, 333, |
| | 281, 336, 364, 174 | 177_183 |
| 122, 128, 333 | 128, 153, 324, 333, 94, 116, | 93, 128, 150, 153, 162, 174, 199, 219, |
| | 149, 182, 196, 224, 270, 276, | 229, 275, 282, 324, 333, 343, 360, |
| | 281, 336, 364 | 177_183 |
| 166 | 128, 153, 324, 333, 94, 116, | 128, 153, 162, 174, 199, 219, 229, 262, |
| | 149, 182, 196, 224, 270, 274, | 275, 282, 324, 333, 177_183 |
| | 281, 336, 364 | |
| 196 | 128, 153, 324, 333, 94, 116, | 93, 128, 150, 153, 162, 174, 199, 219, |
| | 149, 182, 199, 224, 270, 274, | 229, 262, 275, 282, 324, 333, 177_183 |
| | 281, 336, 364 | |
| 196 | 128, 153, 324, 333, 149, 196, | 128, 139, 153, 162, 174, 199, 219, 229, |
| | 262, 276, 364 | 241, 262, 275, 282, 324, 333, 177_183 |
| 222 | 128, 153, 324, 333, 262, 274, | 128, 153, 162, 174, 199, 219, 229, 262, |
| | 281 | 275, 282, 324, 333, 343, 360, 177_183 |
| 120 | 128, 153, 324, 333, 199, 262, | 128, 139, 153, 162, 174, 199, 219, 229, |
| | 276, 281 | 241, 262, 275, 282, 324, 333, 343, 360, |
| | | 177_183 |
| 93 | 128, 153, 324, 333, 196, 262, | 93, 128, 139, 150, 153, 162, 174, 199, |
| | 276, 281 | 219, 229, 241, 262, 275, 282, 324, 333, |
| | | 177_183 |
| 122 | 128, 153, 324, 333, 199, 224, | 93, 128, 150, 153, 162, 174, 199, 219, |
| | 262, 276, 281 | 229, 262, 275, 282, 324, 333, 343, 360, |
| | | 177_183 |
| 229 | 128, 153, 324, 333, 199, 224, | 93, 128, 139, 150, 153, 162, 174, 199, |
| | 262, 276, 281, 336 | 219, 229, 241, 262, 275, 282, 306, 324, |
| | | 333, 177_183 |
| 162 | 128, 153, 324, 333, 149, 199, | 93, 128, 150, 153, 162, 174, 199, 219, |
| | 224, 262, 276, 281, 336, 364 | 229, 262, 275, 282, 306, 324, 333, 343, |
| | | 360, 177_183 |
| 280 | 128, 153, 324, 333, 149, 196, | 93, 128, 139, 150, 153, 162, 174, 199, |
| | 224, 262, 276, 281, 336, 364 | 219, 229, 241, 262, 275, 282, 306, 324, |
| | | 333, 343, 360, 177_183 |
| 318 | 128, 153, 324, 333, 149, 199, | 93, 128, 150, 153, 162, 174, 199, 219, |
| | 224, 262, 276, 281, 336, 364, | 229, 262, 275, 282, 324, 333, 177_183 |
| | 174 | |
| 318 | 128, 153, 324, 333, 94, 116, | 93, 128, 139, 150, 153, 162, 174, 199, |
| | 149, 182, 196, 224, 262, 276, | 219, 229, 241, 262, 275, 282, 324, 333, |
| | 281, 303, 336, 364 | 177_183 |
| 122, 128, 153 | , 122, 128, 153, 333, 324, 162, | 93, 128, 139, 150, 153, 162, 174, 199, |
| | 229, 275, 219, 174, 177_183 | 219, 229, 241, 262, 275, 282, 324, 333, |
| | | 343, 360, 177_183 |
| 122, 128, 153, | 128, 153, 324, 333, 311_321 | 93, 128, 139, 150, 153, 162, 174, 199, |
| 333 | | 219, 229, 241, 262, 275, 282, 306, 324, |
| | | 333, 177_183 |
| 71, 79, 122, 128, | 128, 153, 324, 333, 310_320 | 93, 128, 150, 153, 162, 174, 199, 219, |
| 153, 333 | | 229, 262, 275, 282, 306, 324, 333, 343, |
| | | 360, 177_183 |
| 79, 122, 128, 153, | 128, 153, 324, 333, 307_322 | 93, 128, 139, 150, 153, 162, 174, 199, |
| 189, 333 | | 219, 229, 241, 262, 275, 282, 306, 324, |
| | | 333, 343, 360, 177_183 |
| 79, 122, 128, 153, | 128, 153, 324, 333, 86_105 | 128, 153, 162, 174, 199, 219, 229, 275, |
| 222, 333 | | 281, 324, 333, 177_183 |
| 122, 128, 153, | 128, 153, 324, 333, 271_287 | 93, 128, 150, 153, 162, 174, 199, 219, |
| 189, 222, 333 | | 229, 275, 281, 324, 333, 177_183 |
| 79, 122, 128, 153, | 128, 153, 324, 333, 91_100 | 128, 139, 153, 162, 174, 199, 219, 229, |
| 167, 333 | | 241, 275, 281, 324, 333, 177_183 |
| 79, 122, 128, | 128, 153, 324, 333, 308_324 | 128, 153, 162, 174, 199, 219, 229, 275, |
| 153, 189, 222 | | 281, 324, 333, 343, 360, 177_183 |
| 79, 122, 128, | 128, 153, 324, 333, 311_319 | 128, 139, 153, 162, 174, 199, 219, 229, |
| 153, 167, 222 | | 241, 275, 281, 324, 333, 343, 360, |
| | | 177_183 |
| 79, 102, 122, | 128, 153, 324, 333, 315_317 | 93, 128, 139, 150, 153, 162, 174, 199, |
| 128, 153, 167 | | 219, 229, 241, 275, 281, 324, 333, |
| | | 177_183 |
| 71, 79, 122, 128, | 128, 153, 324, 333, 303_326 | 93, 128, 150, 153, 162, 174, 199, 219, |
| 153, 167 | | 229, 275, 281, 324, 333, 343, 360, |
| | | 177_183 |
| 122, 128, 153, | 128, 153, 324, 333, 93_98 | 128, 153, 162, 174, 199, 219, 229, 262, |
| 162, 333 | | 275, 281, 324, 333, 177_183 |
| 122, 128, 153, | 128, 153, 324, 333, 174_187 | 93, 128, 150, 153, 162, 174, 199, 219, |
| 318, 333 | | 229, 262, 275, 281, 324, 333, 177_183 |
| 122, 128, 153, | 128, 153, 324, 333, 306_324 | 128, 139, 153, 162, 174, 199, 219, 229, |
| 222, 229, 280, | | 241, 262, 275, 281, 324, 333, 177_183 |
| 333 | | |
| 128, 153, 222, | 128, 153, 324, 333, 306_324 | 128, 153, 162, 174, 199, 219, 229, 262, |
| 229, 333 | | 275, 281, 324, 333, 343, 360, 177_183 |
| 128, 153, 222, | 128, 153, 324, 333, 307_324 | 128, 139, 153, 162, 174, 199, 219, 229, |
| 280, 333 | | 241, 262, 275, 281, 324, 333, 343, 360, |
| | | 177_183 |
| 128, 153, 229, | 128, 153, 324, 333, 88_102 | 93, 128, 139, 150, 153, 162, 174, 199, |
| 280, 333 | | 219, 229, 241, 262, 275, 281, 324, 333, |
| | | 177_183 |
| 122, 128, 153, | 128, 153, 324, 333, 311_321, | 93, 128, 150, 153, 162, 174, 199, 219, |
| 162, 222, 229, | 86_105,271_287 | 229, 262, 275, 281, 324, 333, 343, 360, |
| 280, 333 | | 177_183 |
| 128, 153, 162, | 128, 153, 324, 333, 311_321, | 93, 128, 139, 150, 153, 162, 174, 199, |
| 196, 333 | 86_105 | 219, 229, 241, 262, 275, 281, 306, 324, |
| | | 333, 177_183 |
| 128, 153, 162, | 128, 153, 324, 333, 311_321, | 93, 128, 150, 153, 162, 174, 199, 219, |
| 222, 333 | 91_100 | 229, 262, 275, 281, 306, 324, 333, 343, |
| | | 360, 177_183 |
| 128, 153, 162, | 128, 153, 324, 333, 311_321, | 93, 128, 139, 150, 153, 162, 174, 199, |
| 229, 333 | 271_287 | 219, 229, 241, 262, 275, 281, 306, 324, |
| | | 333, 343, 360, 177_183 |
| 128, 153, 162, | 128, 153, 324, 333, 310_320, | 93, 128, 150, 153, 162, 174, 199, 219, |
| 280, 333 | 86_105, 271_287 | 229, 262, 275, 281, 324, 333, 177_183 |
| 128, 153, 162, | 128, 153, 324, 333, 310_320, | 93, 128, 139, 150, 153, 162, 174, 199, |
| 318, 333 | 86_105 | 219, 229, 241, 262, 275, 281, 324, 333, |
| | | 177_183 |
| 128, 153, 162, | 128, 153, 324, 333, 310_320, | 93, 128, 139, 150, 153, 162, 174, 199, |
| 196, 318, 333 | 91_100 | 219, 229, 241, 262, 275, 281, 324, 333, |
| | | 343, 360, 177_183 |
| 128, 153, 196, | 128, 153, 324, 333, 310_320, | 93, 128, 139, 150, 153, 162, 174, 199, |
| 318, 333 | 271_287 | 219, 229, 241, 262, 275, 281, 306, 324, |
| | | 333, 177_183 |
| 128, 153, 162, | 128, 153, 324, 333, 307_322, | 93, 128, 150, 153, 162, 174, 199, 219, |
| 333 | 91_100 | 229, 262, 275, 281, 306, 324, 333, 343, |
| | | 360, 177_183 |
| 128, 153, 196, | 128, 153, 324, 333, 307_322, | 93, 128, 139, 150, 153, 162, 174, 199, |
| 333 | 271_287 | 219, 229, 241, 262, 275, 281, 306, 324, |
| | | 333, 343, 360, 177_183 |
| 128, 153, 318, | 128, 153, 324, 333, 308_324, | 93, 128, 150, 153, 162, 174, 199, 219, |
| 333 | 86_105 | 229, 262, 275, 324, 333, 177_183 |
| 128, 153, 196, | 117, 128, 153, 333 | 128, 139, 153, 162, 174, 199, 219, 229, |
| 310, 318, 333 | | 241, 262, 275, 324, 333, 177_183 |
| 128, 153, 162, | 117, 128, 153, 333 | 128, 153, 162, 174, 199, 219, 229, 262, |
| 196, 310, 318, | | 275, 324, 333, 343, 360, 177_183 |
| 333 | | |
| 122, 128, 153, | 128, 153, 333, 348 | 128, 139, 153, 162, 174, 199, 219, 229, |
| 162 | | 241, 262, 275, 324, 333, 343, 360, |
| | | 177_183 |
| 122, 128, 153, | 128, 153, 333, 347 | 93, 128, 139, 150, 153, 162, 174, 199, |
| 318 | | 219, 229, 241, 262, 275, 324, 333, |
| | | 177_183 |
| 122, 128, 153, | 128, 153, 333, 351 | 93, 128, 150, 153, 162, 174, 199, 219, |
| 222, 229, 280 | | 229, 262, 275, 324, 333, 343, 360, |
| | | 177_183 |
| 122, 128, 153, | 128, 153, 220, 333 | 93, 128, 139, 150, 153, 162, 174, 199, |
| 222, 229 | | 219, 229, 241, 262, 275, 306, 324, 333, |
| | | 177_183 |
| 122, 128, 153, | 128, 153, 221, 333 | 93, 128, 150, 153, 162, 174, 199, 219, |
| 222, 280 | | 229, 262, 275, 306, 324, 333, 343, 360, |
| | | 177_183 |
| 122, 128, 153, | 128, 153, 275, 333 | 93, 128, 139, 150, 153, 162, 174, 199, |
| 229, 280 | | 219, 229, 241, 262, 275, 306, 324, 333, |
| | | 343, 360, 177_183 |
| 122, 128, 153, | 128, 153, 333, 200_202 | 93, 128, 150, 153, 162, 174, 199, 219, |
| 162, 222, 229, | | 229, 262, 275, 324, 333, 177_183 |
| 280 | | |
| 122, 128, 153, | 117, 128, 153, 222, 333, 348 | 93, 128, 139, 150, 153, 162, 174, 199, |
| 162, 196 | | 219, 229, 241, 262, 275, 324, 333, |
| | | 177_183 |
| 122, 128, 153, | 125, 128, 153, 324, 333 | 93, 128, 139, 150, 153, 162, 174, 199, |
| 162, 222 | | 219, 229, 241, 262, 275, 324, 333, 343, |
| | | 360, 177_183 |
| 122, 128, 153, | 125, 128, 153, 280, 333 | 93, 128, 139, 150, 153, 162, 174, 199, |
| 162, 229 | | 219, 229, 241, 262, 275, 306, 324, 333, |
| | | 177_183 |
| 122, 128, 153, | 125, 128, 153, 162, 229, 333 | 93, 128, 150, 153, 162, 174, 199, 219, |
| 162, 280 | | 229, 262, 275, 306, 324, 333, 343, 360, |
| | | 177_183 |
| 122, 128, 153, | 125, 128, 153, 162, 229, 324, | 93, 128, 139, 150, 153, 162, 174, 199, |
| 162, 318 | 333 | 219, 229, 241, 262, 275, 306, 324, 333, |
| | | 343, 360, 177_183 |
| 122, 128, 153, | 125, 128, 153, 162, 229, 280, | 128, 153, 162, 174, 197, 219, 229, 262, |
| 162, 196, 318 | 324, 333 | 275, 324, 333, 177_183 |
| 122, 128, 153, | 128, 153, 162, 229, 324, 333, | 93, 128, 150, 153, 162, 174, 197, 219, |
| 196, 318 | 177_183 | 229, 262, 275, 324, 333, 177_183 |
| 122, 128, 153, | 128, 153, 162, 180, 183, 229, | 128, 139, 153, 162, 174, 197, 219, 229, |
| 196 | 324, 333, 176_178 | 241, 262, 275, 324, 333, 177_183 |
| 122, 128, 153, | 128, 153, 162, 229, 313, 317, | 128, 153, 162, 174, 197, 219, 229, 262, |
| 196, 212, 318 | 324, 333, 177_319 | 275, 324, 333, 343, 360, 177_183 |
| 122, 128, 153, | 128, 153, 162, 229, 324, 333, | 128, 139, 153, 162, 174, 197, 219, 229, |
| 196, 310, 318 | 177_319 | 241, 262, 275, 324, 333, 343, 360, |
| | | 177_183 |
| 122, 128, 153, | 128, 153, 162, 229, 313, 314, | 93, 128, 139, 150, 153, 162, 174, 197, |
| 162, 196, 310, | 324, 333, 177_318 | 219, 229, 241, 262, 275, 324, 333, |
| 318 | | 177_183 |
| 128, 153, 166, | 128, 153, 162, 229, 293, 294, | 93, 128, 150, 153, 162, 174, 197, 219, |
| 333 | 297, 324, 333, 177_183 | 229, 262, 275, 324, 333, 343, 360, |
| | | 177_183 |
| 128, 153, 196, | 128, 153, 162, 229, 294, 295, | 93, 128, 139, 150, 153, 162, 174, 197, |
| 333 | 324, 333, 177_183 | 219, 229, 241, 262, 275, 306, 324, 333, |
| | | 177_183 |
| 128, 153, 196, | 128, 153, 162, 229, 294, 295, | 93, 128, 150, 153, 162, 174, 197, 219, |
| 333 | 297, 324, 333, 177_183 | 229, 262, 275, 306, 324, 333, 343, 360, |
| | | 177_183 |
| 128, 153, 196, | 128, 153, 162, 229, 324, 333, | 93, 128, 139, 150, 153, 162, 174, 197, |
| 333 | 177_185 | 219, 229, 241, 262, 275, 306, 324, 333, |
| | | 343, 360, 177_183 |
| 128, 153, 222, | 128, 153, 162, 229, 324, 333, | 93, 128, 150, 153, 162, 174, 197, 219, |
| 333 | 180_185 | 229, 262, 275, 324, 333, 177_183 |
| 128, 153, 222, | 128, 153, 162, 229, 318, 324, | 93, 128, 139, 150, 153, 162, 174, 197, |
| 333 | 333, 177_317 | 219, 229, 241, 262, 275, 324, 333, |
| | | 177_183 |
| 128, 153, 222, | 128, 153, 162, 229, 324, 333, | 93, 128, 139, 150, 153, 162, 174, 197, |
| 333 | 177_317 | 219, 229, 241, 262, 275, 324, 333, 343, |
| | | 360, 177_183 |
| 120, 128, 153, | 128, 153, 199, 324, 333 | 93, 128, 139, 150, 153, 162, 174, 197, |
| 333 | | 219, 229, 241, 262, 275, 306, 324, 333, |
| | | 177_183 |
| 122, 128, 153, | 128, 153, 174, 324, 333 | 93, 128, 150, 153, 162, 174, 197, 219, |
| 333 | | 229, 262, 275, 306, 324, 333, 343, 360, |
| | | 177_183 |
| 122, 128, 153, | 128, 153, 262, 324, 333 | 93, 128, 139, 150, 153, 162, 174, 197, |
| 333 | | 219, 229, 241, 262, 275, 306, 324, 333, |
| | | 343, 360, 177_183 |
| 128, 153, 229, | 128, 153, 324, 333, 336 | 93, 128, 150, 153, 162, 174, 199, 219, |
| 333 | | 229, 275, 324, 333, 177_183 |
| 128, 153, 229, | 116, 128, 153, 324, 333 | 128, 139, 153, 162, 174, 199, 219, 229, |
| 333 | | 241, 275, 324, 333, 177_183 |
| 128, 153, 162, | 128, 149, 153, 324, 333 | 128, 153, 162, 174, 199, 219, 229, 275, |
| 333 | | 324, 333, 343, 360, 177_183 |
| 128, 153, 280, | 128, 153, 182, 324, 333 | 128, 139, 153, 162, 174, 199, 219, 229, |
| 333 | | 241, 275, 324, 333, 343, 360, 177_183 |
| 128, 153, 280, | 94, 128, 153, 324, 333 | 93, 128, 139, 150, 153, 162, 174, 199, |
| 333 | | 219, 229, 241, 275, 324, 333, 177_183 |
| 128, 153, 280, | 128, 153, 276, 324, 333 | 93, 128, 150, 153, 162, 174, 199, 219, |
| 333 | | 229, 275, 324, 333, 343, 360, 177_183 |
| 128, 153, 280, | 128, 153, 270, 324, 333 | 128, 139, 153, 162, 219, 229, 275, 324, |
| 333 | | 333, 177_183 |
| 128, 153, 280, | 128, 153, 274, 324, 333 | 128, 153, 162, 219, 229, 241, 275, 324, |
| 333 | | 333, 177_183 |
| 128, 153, 324, | 128, 153, 303, 324, 333 | 128, 153, 162, 219, 229, 275, 324, 333, |
| 333 | | 343, 177_183 |
| 128, 153, 310, | 128, 153, 324, 333, 364 | 128, 153, 162, 219, 229, 275, 324, 333, |
| 333 | | 177_183 |
| 128, 153, 310, | 128, 153, 224, 324, 333 | 128, 153, 162, 219, 229, 275, 282, 324, |
| 333 | | 333, 177_183 |
| 128, 153, 310, | 128, 153, 281, 324, 333 | 128, 153, 162, 197, 219, 229, 275, 324, |
| 333 | | 333, 177_183 |
| 128, 153, 318, | 84, 128, 153, 324, 333 | 128, 153, 162, 219, 229, 275, 324, 333, |
| 333 | | 360, 177_183 |
| 128, 153, 318, | 84, 128, 153, 324, 333 | 128, 153, 162, 219, 229, 262, 275, 324, |
| 333 | | 333, 177_183 |
| 128, 153, 318, | 102, 128, 153, 324, 333 | 128, 153, 162, 199, 219, 229, 275, 324, |
| 333 | | 333, 177_183 |
| 128, 153, 318, | 128, 153, 185, 324, 333 | 128, 153, 162, 219, 229, 275, 281, 324, |
| 333 | | 333, 177_183 |
| 128, 153, 318, | 128, 153, 182, 324, 333 | 93, 128, 153, 162, 219, 229, 275, 324, |
| 333 | | 333, 177_183 |
| 128, 153, 318, | 128, 153, 242, 324, 333 | 128, 153, 162, 219, 229, 275, 306, 324, |
| 333 | | 333, 177_183 |
| 128, 153, 318, | 128, 153, 301, 324, 333 | 128, 150, 153, 162, 219, 229, 275, 324, |
| 333 | | 333, 177_183 |
| 128, 153, 318, | 128, 153, 303, 324, 333 | 128, 153, 162, 174, 196, 219, 229, 275, |
| 333 | | 318, 324, 333, 177_183 |
| 128, 153, 318, | 128, 153, 310, 324, 333 | 128, 153, 162, 174, 219, 222, 229, 275, |
| 333 | | 280, 324, 333, 177_183 |
| 128, 153, 318, | 128, 153, 174, 324, 333 | 128, 153, 162, 174, 196, 219, 222, 229, |
| 333 | | 275, 280, 318, 324, 333, 177_183 |
| 128, 153, 201, | 128, 153, 173, 324, 333 | 128, 153, 162, 174, 219, 229, 275, 324, |
| 333 | | 332, 333, 177_183 |
| 128, 153, 201, | 128, 153, 196, 324, 333 | 128, 153, 162, 174, 219, 229, 233, 275, |
| 333 | | 324, 333, 177_183 |
| 128, 153, 197, | 128, 153, 196, 324, 333 | 128, 153, 162, 174, 219, 229, 254, 275, |
| 333 | | 324, 333, 177_183 |
| 128, 153, 160, | 128, 153, 195, 324, 333 | 128, 153, 162, 174, 219, 229, 275, 324, |
| 333 | | 333, 363, 177_183 |
| 128, 153, 165, | 128, 153, 195, 324, 333 | 128, 153, 162, 174, 219, 229, 275, 324, |
| 333 | | 333, 366, 177_183 |
| 128, 153, 309, | 128, 153, 197, 324, 333 | 128, 153, 162, 174, 219, 229, 275, 324, |
| 333 | | 333, 347, 177_183 |
| 128, 153, 319, | 128, 153, 197, 324, 333 | 122, 128, 153, 162, 174, 196, 219, 229, |
| 333 | | 275, 318, 324, 333, 177_183 |
| 128, 153, 319, | 128, 153, 197, 324, 333 | 122, 128, 153, 162, 174, 219, 222, 229, |
| 333 | | 275, 280, 324, 333, 177_183 |
| 128, 153, 320, | 128, 153, 263, 324, 333 | 122, 128, 153, 162, 174, 196, 219, 222, |
| 333 | | 229, 275, 280, 318, 324, 333, 177_183 |
| 128, 153, 320, | 128, 153, 268, 324, 333 | 128, 153, 162, 174, 219, 229, 275, 324, |
| 333 | | 333, 363, 366, 177_183 |
| 79, 128, 153, | 128, 153, 268, 324, 333 | 128, 153, 162, 174, 219, 229, 275, 324, |
| 189, 222, 333 | | 332, 333, 347, 177_183 |
| 71, 79, 128, 153, | 128, 153, 268, 324, 333 | 128, 153, 162, 174, 219, 229, 254, 275, |
| 222, 333 | | 324, 332, 333, 347, 363, 366, 177_183 |
| 71, 79, 128, 153, | 128, 153, 276, 324, 333 | 125, 128, 153, 162, 174, 219, 229, 275, |
| 189, 333 | | 324, 333, 177_183 |
| 71, 128, 153, | 128, 153, 275, 324, 333 | 128, 152, 153, 162, 174, 219, 229, 275, |
| 189, 222, 333 | | 324, 333, 177_183 |
| 128, 153, 324, | 128, 153, 279, 324, 333 | 128, 153, 162, 174, 219, 229, 275, 324, |
| 333, 162, 229 | | 333, 177_183 |
| 128, 153, 324, | 128, 153, 279, 324, 333 | 128, 153, 162, 174, 197, 219, 229, 275, |
| 333, 162, 229, | | 324, 333, 177_183 |
| 196 | | |
| 128, 153, 324, | 128, 153, 281, 324, 333 | 128, 153, 162, 174, 219, 229, 233, 275, |
| 333, 162, 229, | | 324, 332, 333, 177_183 |
| 280 | | |
| 128, 153, 324, | 128, 153, 281, 324, 333 | 128, 153, 162, 219, 229, 280, 324, 333 |
| 333, 162, 229, | | |
| 280, 196 | | |
| 128, 153, 324, | 128, 153, 282, 324, 333 | 128, 153, 162, 219, 229, 280, 307, 324, |
| 333, 196 | | 333 |
| 128, 153, 324, | 128, 153, 282, 324, 333 | 122, 128, 153, 162, 219, 229, 280, 324, |
| 333, 280 | | 333, 177_183 |
| 128, 153, 324, | 128, 153, 324, 333 | 122, 128, 153, 162, 219, 229, 275, 324, |
| 333, 280, 196 | | 333, 177_183 |
| 128, 153, 324, | 128, 153, 324, 329, 333 | 128, 153, 162, 219, 229, 275, 318, 324, |
| 333, 162, 229, | | 333, 177_183 |
| 196 | | |
| 128, 153, 324, | 128, 153, 324, 329, 333 | 128, 153, 162, 219, 229, 318, 324, 333, |
| 333, 162, 229, | | 177_183 |
| 280, 196 | | |
| 128, 153, 324, | 128, 153, 279, 324, 333 | 128, 153, 219, 275, 324, 333, 177_183 |
| 333, 162, 229, | | |
| 280, 222 | | |
| 128, 153, 324, | 128, 153, 279, 324, 333 | 122, 128, 153, 219, 324, 333, 177_183 |
| 333, 162, 229, | | |
| 280, 222, 196 | | |
| 128, 153, 324, | 71, 128, 153, 189, 324, 343 | 71, 128, 153, 219, 324, 333, 177_183 |
| 333, 162, 229, | | |
| 280, 222, 196 | | |
| 128, 153, 324, | 71, 94, 128, 143, 153, 189, 294, | 128, 153, 162, 229, 324, 333, 177_183 |
| 333, 318 | 324, 333, 343 | |
| 128, 153, 324, | 71, 84, 94, 128, 143, 153, 189, | 128, 153, 162, 229, 275, 324, 333, |
| 333, 162, 229, | 242, 294, 324, 333, 343 | 177_183 |
| 318 | | |
| 128, 153, 324, | 71, 84, 86, 91, 94, 128, 143, | 122, 128, 153, 162, 229, 324, 333, |
| 333, 162, 229, | 153, 181, 189, 228, 242, 243, | 177_183 |
| 280, 318 | 244, 256, 294, 324, 333, 343 | |
| 128, 153, 324, | 128, 153, 260, 324, 333, 346, | 128, 153, 162, 174, 199, 219, 229, 275, |
| 333, 320 | 347, 374 | 324, 333, 177_183 |
| 128, 153, 324, | 128, 153, 164, 260, 324, 333, | 128, 153, 324, 333, 318, 316 |
| 333, 162, 229, | 346, 347, 374 | |
| 320 | | |
| 128, 153, 324, | 128, 153, 175, 260, 323, 324, | 128, 153, 324, 333, 221 |
| 333, 162, 229, | 333, 346, 347, 374 | |
| 280, 320 | | |
| 128, 153, 324, | 128, 142, 153, 260, 324, 333, | 128, 153, 324, 333, 219 |
| 333, 122 | 346, 347 | |
| 128, 153, 324, | 128, 142, 153, 232, 260, 324, | 128, 153, 324, 333, 252 |
| 333, 162, 229, | 333, 337, 346, 347 | |
| 122 | | |
| 128, 153, 324, | 128, 142, 153, 217, 260, 324, | 128, 153, 324, 333, 250, 251 |
| 333, 162, 229, | 333, 337, 346, 347 | |
| 280, 122 | | |
| 128, 153, 324, | 115, 128, 142, 153, 260, 324, | 128, 153, 324, 333, 250, 251 |
| 333, 71, 68, 75, | 333, 337, 346, 347 | |
| 88 | | |
| 128, 153, 324, | 128, 142, 148, 153, 182, 260, | 128, 153, 324, 333, 205, 206 |
| 333, 162, 229, 71, | 286, 323, 324, 333, 346, 347 | |
| 68, 75, 88 | | |
| 128, 153, 324, | 128, 153, 162, 174, 219, 229, | 128, 153, 324, 333, 205, 206 |
| 333, 162, 229, | 233, 275, 324, 332, 333, | |
| 280, 71, 68, 75, | 177_183 | |
| 88 | | |
| 128, 153, 324, | 125, 128, 153, 162, 174, 219, | 128, 153, 324, 333, 205, 206 |
| 333, 162, 229, | 229, 233, 275, 324, 332, 333, | |
| 280, 196, 71, 68, | 177_183 | |
| 75,88 | | |
| 128, 153, 324, | 122, 128, 153, 162, 174, 219, | 128, 153, 324, 333, 205, 206 |
| 333, 318, 320, | 229, 233, 275, 324, 332, 333, | |
| 122, 71, 68, 75, | 177_183 | |
| 88 | | |
| 128, 153, 324, | 122, 125, 128, 153, 162, 174, | 128, 153, 324, 333, 205, 206, 250, 251 |
| 333, 162, 229, | 219, 229, 233, 275, 324, 332, | |
| 318, 320, 122, 71, | 333, 177_183 | |
| 68, 75,88 | | |
| 128, 153, 324, | 128, 153, 162, 174, 219, 229, | 128, 153, 162, 219, 229, 275, 318, 324, |
| 333, 162, 229, | 275, 324, 333, 177_183 | 333, 177_183 |
| 280, 318, 320, | | |
| 122, 71, 68, 75, | | |
| 88 | | |
| 128, 153, 324, | 125, 128, 153, 162, 174, 219, | 128, 153, 162, 219, 229, 318, 324, 333, |
| 333, 162, 229, | 229, 275, 324, 333, 177_183 | 177_183 |
| 280, 196, 318, | | |
| 320, 122, 71, 68, | | |
| 75,88 | | |
| 128, 153, 324, | 122, 128, 153, 162, 174, 219, | 128, 153, 219, 275, 324, 333, 177_183 |
| 333, 275 | 229, 275, 324, 333, 177_183 | |
| 128, 153, 324, | 122, 125, 128, 153, 162, 174, | 122, 128, 153, 219, 324, 333, 177_183 |
| 333, 162, 229, | 219, 229, 275, 324, 333, | |
| 275 | 177_183 | |
| 128, 153, 324, | 128, 153, 324, 333, 380 | 71, 128, 153, 219, 324, 333, 177_183 |
| 333, 162, 229, | | |
| 280, 275 | | |
| 128, 153, 324, | 128, 153, 162, 219, 229, 324, | 128, 153, 162, 219, 229, 324, 333, |
| 333, 162, 229, | 333, 177_183 | 177_183 |
| 280, 222, 196, | | |
| 318 | | |
| 128, 153, 324, | 128, 153, 162, 219, 229, 275, | 71, 128, 153, 162, 219, 229, 324, 333, |
| 333, 162, 229, | 324, 333, 177_183 | 177_183 |
| 280, 222, 196, | | |
| 320 | | |
| 128, 153, 324, | 122, 128, 153, 162, 219, 229, | 128, 153, 162, 219, 229, 275, 324, 333, |
| 333, 162, 229, | 324, 333, 177_183 | 177_183 |
| 280, 222, 196, | | |
| 122 | | |
| 128, 153, 324, | 128, 153, 162, 219, 229, 275, | 122, 128, 153, 162, 219, 229, 324, 333, |
| 333, 162, 229, | 280, 324, 333, 177_183 | 177_183 |
| 280, 222, 196, | | |
| 275 | | |
| 128, 153, 324, | 122, 128, 153, 162, 219, 229, | 128, 153, 162, 219, 229, 275, 280, 324, |
| 333, 162, 229, | 280, 324, 333, 177_183 | 333, 177_183 |
| 280, 222, 196, 71, | | |
| 68, 75, 88 | | |
| 128, 153, 324, | 71, 128, 153, 162, 219, 229, | 128, 153, 324, 333, 112 |
| 333, 162, 229, | 324, 333, 177_183 | |
| 280, 222, 196, | | |
| 318, 320, 122, 71, | | |
| 68, 75, 88 | | |
| 128, 153, 324, | 122, 128, 153, 162, 219, 229, | 128, 153, 324, 333, 327 |
| 333, 71 | 275, 324, 333, 177_183 | |
| 128, 153, 324, | 128, 153, 324, 333, 219 | 128, 153, 324, 333, 68 |
| 333, 219 | | |
| 128, 153, 324, | 128, 153, 324, 333, 221 | 128, 153, 324, 333, 75 |
| 333, 219 | | |
| 128, 153, 324, | 128, 153, 324, 333, 88 | |
| 333, 318, 316 | | |

[0058] In some embodiments, the polypeptide having protease activity comprises one or more mutations at positions corresponding to position 187 of SEQ ID NO: 2. In some embodiments, the polypeptide having protease activity comprises one or more mutations at positions corresponding to position 157, and 187 of SEQ ID NO: 2.

[0059] In some embodiments, the polypeptide having protease activity comprises one or more mutations selected from Table 3A or Table 3B. In some embodiments, the polypeptide having protease activity comprises one or more mutations selected from D71E, D71Q, D88H, D112Q, D152N, D139E, D307N, D293G, D295K, D295N, E75Y, E86D, E120D, E120G, E143D, E166Q, E241D, E310D, E310N, E310Q, E310S, E347N, E347R, E348R, E363K, E366K, F148Y, F175I, F333D, F333E, F333N, G199P, H174D, H174E, H197D, H197K, H197R, H222E, H222Q, H222S, H222T, H268G, H268R, H268S, H275L, H275Y, 184G, 184P, 184V, I262K, I301L, 1336A, K68W, K93D, K93S, K115L, K116D, K149L, K150E, K160E, K165E, K167R, K183D, K195L, K195R, K196D, K196E, K196L, K196Q, K196S, K196T, K201E, K201S, K205L, K229D, K229E, K229N, K244L, K297N, K297R, K318A, K318D, K318E, K318F, K318G, K318I, K318L, K318N, K318P, K318Q, K318S, K318V, K320W, K324I, K346P, K360R, L153P, L279G, L279T, L279W, L279Y, L329K, L329R, M117E, M117F, M323L, N162D, N162E, N173K, N182D, N182P, N219G, N219K, N219Q, N219T, N228K, N233G, N242G, N243K, N260A, P205F, P205FG, P205L, P205LG, Q180H, Q232E, Q294E, R142K, R189K, R250GGYGG (SEQ ID NO: 918), R250GYG, R256D, R282G, R282N, R280A, R280D, R280E, R280N, R280T, R280Y, R309G, R319E, R319T, R320L, R320Q, R320W, R337L, R360L, S94D, S94E, S94N, S128A, S181D, S220Y, S221E, S221N, S221Y, S251I, S286T, S306P, S317N, T122E, T122N, T122S, T167G, T176G, T276G, T276R, V102A, V102L, V164K, V270P, V274G, V303I, V303Y, V364E, Y212F, Y217W, Y224T, Y252R, Y281H, Y281S, Y281T, Y360L, 177_183delinsRDNRDN (SEQ ID NO: 919), 177_183KEYQSNKdelinsESDHG (SEQ ID NOs: 920 and 921), 177_183KEYQSNKdelinsRDNRDN (SEQ ID NOs: 920 and 919), 177_185KEYQSNKYAdelinsESPNT (SEQ ID NOs: 922 and 923), 177_318KEYQSNKNSKdelinsRDNRDN (SEQ ID NOs: 924 and 919), 177_319KEYQSNKDRdelinsRDNRDN (SEQ ID NOs: 925 and 919), 177_319KEYQSNKFNDNSKRdelinsRDNRDNIGDE (SEQ ID NOs: 926 and 927), 177_317KEYQSNKNDNSdelinsRDNRDN (SEQ ID NOs: 928 and 919), 180_185QSNKYAdelinsSG (SEQ ID NO: 929), 200_202NKAdelinsPYLSTKHL (SEQ ID NO: 930), 271_287delinsVGISGSAGGIKSVDSDGDSYI (SEQ ID NO: 932), 308_324delinsTKSVDSDGDSYKINY (SEQ ID NO: 932), 303_326delinsTGAKGNNYFGHWHFAVRVRL (SEQ ID NO: 933), 306_324delinsGHYGVYNGVTYWGHTPLHLAAMLGHLVYGLY (SEQ ID NO: 934), 306_324delinsQRTPLHLAAWADHLYR (SEQ ID NO: 935), 307_322delinsLAKGNNYFGHWHFAVM (SEQ ID NO: 936), 307_324delinsGGFAFDISIDNGNEDVY (SEQ ID NO: 937), 311_319delinsLLKPKILGYNITSGYSDEIY (SEQ ID NO: 938), 311_321delinsLSNVEALGYNITSGYSDKRY (SEQ ID NO: 939), 310_320delinsFLVFGVTYDGSTPVP (SEQ ID NO: 940), 311_321delinsLSNVEALGYNITSGYSDKRY (SEQ ID NO: 939), 86_105delinsDDMEAKGNNYFGHWHFAVATN (SEQ ID NO: 941), 88_102delinsGEIVAFDISIDNGNEDLAEILQLSTYDGGG (SEQ ID NO: 942), 91_100delinsGGGGGKSVDSDGDSYGGGGG (SEQ ID NO: 943), 93_98delinsGGGGGKSVDSDGDSYGGGG (SEQ ID NO: 944), 174_187delinsVMYKGKKLLEAARAGQPDSSE (SEQ ID NO: 945), 271_287delinsVGISGSAGGIKSVDSDGDSYI (SEQ ID NO: 932), 303_326delinsTGAKGNNYFGHWHFAVRVRL (SEQ ID NO: 933), 308_324delinsTKSVDSDGDSYKINY (SEQ ID NO: 932), and 380insENNVADSNKNSEDVEVSSVEFDFLNFKYPKNEDQVSTEDMRLTLKDTNVFNQPQ VKISFEEQNGNDWKEKDSGTFEEGKKYRLKIDVNKLALKIYGHLSKNKLNVIVNGKAV NIQNVVKKDSIETSFTIYSDSIDLEKINYWTDSFNNWS (SEQ ID NO: 744), wherein the positions correspond to SEQ ID NO: 1.

[0060] In some embodiments, the polypeptide having protease activity comprises an amino acid sequence having at least 50%, at least 51%, at least 52%, at least 53%, at least 54%, at least 55%, at least 56%, at least 57%, at least 58%, at least 59%, at least 60%, at least 61%, at least 62%, at least 63%, at least 64%, at least 65%, at least 66%, at least 67%, at least 68%, at least 69%, at least 70%, at least 71%, at least 72%, at least 73%, at least 74%, at least 75%, at least 76%, at least 77%, at least 78%, at least 79%, at least 80%, at least 81%, at least 82%, at least 83%, at least 84%, at least 85%, at least 86%, at least 87%, at least 88%, at least 89%, at least 90%, at least 91%, at least 92%, at least 93%, at least 94%, at least 95%, at least 96%, at least 97%, at least 98%, or at least 99% sequence identity to SEQ ID NO: 1, provided that the amino acid sequence comprises one or more mutations selected from Table 3A or Table 3B.

[0061] In some embodiments, the polypeptide having protease activity comprises an amino acid sequence having at least 50%, at least 51%, at least 52%, at least 53%, at least 54%, at least 55%, at least 56%, at least 57%, at least 58%, at least 59%, at least 60%, at least 61%, at least 62%, at least 63%, at least 64%, at least 65%, at least 66%, at least 67%, at least 68%, at least 69%, at least 70%, at least 71%, at least 72%, at least 73%, at least 74%, at least 75%, at least 76%, at least 77%, at least 78%, at least 79%, at least 80%, at least 81%, at least 82%, at least 83%, at least 84%, at least 85%, at least 86%, at least 87%, at least 88%, at least 89%, at least 90%, at least 91%, at least 92%, at least 93%, at least 94%, at least 95%, at least 96%, at least 97%, at least 98%, or at least 99% sequence identity to SEQ ID NO: 1, provided that the amino acid sequence comprises one or more mutations selected from D71E, D71Q, D88H, D112Q, D152N, D139E, D307N, D293G, D295K, D295N, E75Y, E86D, E120D, E120G, E143D, E166Q, E241D, E310D, E310N, E310Q, E310S, E347N, E347R, E348R, E363K, E366K, F148Y, F175I, F333D, F333E, F333N, G199P, H174D, H174E, H197D, H197K, H197R, H222E, H222Q, H222S, H222T, H268G, H268R, H268S, H275L, H275Y, 184G, 184P, 184V, I262K, I301L, I336A, K68W, K93D, K93S, K115L, K116D, K149L, K150E, K160E, K165E, K167R, K183D, K195L, K195R, K196D, K196E, K196L, K196Q, K196S, K196T, K201E, K201S, K205L, K229D, K229E, K229N, K244L, K297N, K297R, K318A, K318D, K318E, K318F, K318G, K318I, K318L, K318N, K318P, K318Q, K318S, K318V, K320W, K324I, K346P, K360R, L153P, L279G, L279T, L279W, L279Y, L329K, L329R, M117E, M117F, M323L, N162D, N162E, N173K, N182D, N182P, N219G, N219K, N219Q, N219T, N228K, N233G, N242G, N243K, N260A, P205F, P205FG, P205L, P205LG, Q180H, Q232E, Q294E, R142K, R189K, R250GGYGG (SEQ ID NO: 918), R250GYG, R256D, R282G, R282N, R280A, R280D, R280E, R280N, R280T, R280Y, R309G, R319E, R319T, R320L, R320Q, R320W, R337L, R360L, S94D, S94E, S94N, S128A, S181D, S220Y, S221E, S221N, S221Y, S251I, S286T, S306P, S317N, T122E, T122N, T122S, T167G, T176G, T276G, T276R, V102A, V102L, V164K, V270P, V274G, V303I, V303Y, V364E, Y212F, Y217W, Y224T, Y252R, Y281H, Y281S, Y281T, Y360L, 177_183delinsRDNRDN (SEQ ID NO: 919), 177_183KEYQSNKdelinsESDHG (SEQ ID NOs: 920 and 921), 177_183KEYQSNKdelinsRDNRDN (SEQ ID NOs: 920 and 919), 177_185KEYQSNKYAdelinsESPNT (SEQ ID NOs: 922 and 923), 177_318KEYQSNKNSKdelinsRDNRDN (SEQ ID NOs: 924 and 919), 177_319KEYQSNKDRdelinsRDNRDN (SEQ ID NOs: 925 and 919), 177_319KEYQSNKFNDNSKRdelinsRDNRDNIGDE (SEQ ID NOs: 926 and 927), 177_317KEYQSNKNDNSdelinsRDNRDN (SEQ ID NOs: 928 and 919), 180_185QSNKYAdelinsSG (SEQ ID NO: 929), 200_202NKAdelinsPYLSTKHL (SEQ ID NO: 930), 271_287delinsVGISGSAGGIKSVDSDGDSYI (SEQ ID NO: 932), 308_324delinsTKSVDSDGDSYKINY (SEQ ID NO: 932), 303_326delinsTGAKGNNYFGHWHFAVRVRL (SEQ ID NO: 933), 306_324delinsGHYGVYNGVTYWGHTPLHLAAMLGHLVYGLY (SEQ ID NO: 934), 306_324delinsQRTPLHLAAWADHLYR (SEQ ID NO: 935), 307_322delinsLAKGNNYFGHWHFAVM (SEQ ID NO: 936), 307_324delinsGGFAFDISIDNGNEDVY (SEQ ID NO: 937), 311_319delinsLLKPKILGYNITSGYSDEIY (SEQ ID NO: 938), 311_321delinsLSNVEALGYNITSGYSDKRY (SEQ ID NO: 939), 310_320delinsFLVFGVTYDGSTPVP (SEQ ID NO: 940), 311_321delinsLSNVEALGYNITSGYSDKRY (SEQ ID NO: 939), 86_105delinsDDMEAKGNNYFGHWHFAVATN (SEQ ID NO: 941), 88_102delinsGEIVAFDISIDNGNEDLAEILQLSTYDGGG (SEQ ID NO: 942), 91_100delinsGGGGGKSVDSDGDSYGGGGG (SEQ ID NO: 943), 93_98delinsGGGGGKSVDSDGDSYGGGG (SEQ ID NO: 944), 174_187delinsVMYKGKKLLEAARAGQPDSSE (SEQ ID NO: 945), 271_287delinsVGISGSAGGIKSVDSDGDSYI (SEQ ID NO: 932), 303_326delinsTGAKGNNYFGHWHFAVRVRL (SEQ ID NO: 933), 308_324delinsTKSVDSDGDSYKINY (SEQ ID NO: 932), and 380insENNVADSNKNSEDVEVSSVEFDFLNFKYPKNEDQVSTEDMRLTLKDTNVFNQPQ VKISFEEQNGNDWKEKDSGTFEEGKKYRLKIDVNKLALKIYGHLSKNKLNVIVNGKAV NIQNVVKKDSIETSFTIYSDSIDLEKINYWTDSFNNWS (SEQ ID NO: 744), wherein the positions correspond to SEQ ID NO: 1.

[0062] In some embodiments, the polypeptide having protease activity comprises an amino acid sequence having at least 50%, at least 60%, at least 70%, at least 80%, at least 81%, at least 82%, at least 83%, at least 84%, at least 85%, at least 86%, at least 87%, at least 88%, at least 89%, at least 90%, at least 91%, at least 92%, at least 93%, at least 94%, at least 95%, at least 96%, at least 97%, at least 98%, or at least 99% sequence identity to SEQ ID NO: 1, provided that the amino acid sequence comprises mutations of L153P, R189K, S128A, wherein the positions correspond to SEQ ID NO: 1. In some embodiments, the polypeptide having protease activity comprises an amino acid sequence having at least 50%, at least 60%, at least 70%, at least 80%, at least 81%, at least 82%, at least 83%, at least 84%, at least 85%, at least 86%, at least 87%, at least 88%, at least 89%, at least 90%, at least 91%, at least 92%, at least 93%, at least 94%, at least 95%, at least 96%, at least 97%, at least 98%, or at least 99% sequence identity to SEQ ID NO: 1, provided that the amino acid sequence comprises mutations of L153P, S128A, F333N, wherein the positions correspond to SEQ ID NO: 1. In some embodiments, the polypeptide having protease activity comprises an amino acid sequence having at least 50%, at least 60%, at least 70%, at least 80%, at least 81%, at least 82%, at least 83%, at least 84%, at least 85%, at least 86%, at least 87%, at least 88%, at least 89%, at least 90%, at least 91%, at least 92%, at least 93%, at least 94%, at least 95%, at least 96%, at least 97%, at least 98%, or at least 99% sequence identity to SEQ ID NO: 1, provided that the amino acid sequence comprises mutations of T122S, K229E, wherein the positions correspond to SEQ ID NO: 1. In some embodiments, the polypeptide having protease activity comprises an amino acid sequence having at least 50%, at least 60%, at least 70%, at least 80%, at least 81%, at least 82%, at least 83%, at least 84%, at least 85%, at least 86%, at least 87%, at least 88%, at least 89%, at least 90%, at least 91%, at least 92%, at least 93%, at least 94%, at least 95%, at least 96%, at least 97%, at least 98%, or at least 99% sequence identity to SEQ ID NO: 1, provided that the amino acid sequence comprises mutations of T122S, L153P, wherein the positions correspond to SEQ ID NO: 1. In some embodiments, the polypeptide having protease activity comprises an amino acid sequence having at least 50%, at least 60%, at least 70%, at least 80%, at least 81%, at least 82%, at least 83%, at least 84%, at least 85%, at least 86%, at least 87%, at least 88%, at least 89%, at least 90%, at least 91%, at least 92%, at least 93%, at least 94%, at least 95%, at least 96%, at least 97%, at least 98%, or at least 99% sequence identity to SEQ ID NO: 1, provided that the amino acid sequence comprises mutations of T122S, L153P, R189K, wherein the positions correspond to SEQ ID NO: 1. In some embodiments, the polypeptide having protease activity comprises an amino acid sequence having at least 50%, at least 60%, at least 70%, at least 80%, at least 81%, at least 82%, at least 83%, at least 84%, at least 85%, at least 86%, at least 87%, at least 88%, at least 89%, at least 90%, at least 91%, at least 92%, at least 93%, at least 94%, at least 95%, at least 96%, at least 97%, at least 98%, or at least 99% sequence identity to SEQ ID NO: 1, provided that the amino acid sequence comprises mutations of T122S, L153P, S128A, wherein the positions correspond to SEQ ID NO: 1. In some embodiments, the polypeptide having protease activity comprises an amino acid sequence having at least 50%, at least 60%, at least 70%, at least 80%, at least 81%, at least 82%, at least 83%, at least 84%, at least 85%, at least 86%, at least 87%, at least 88%, at least 89%, at least 90%, at least 91%, at least 92%, at least 93%, at least 94%, at least 95%, at least 96%, at least 97%, at least 98%, or at least 99% sequence identity to SEQ ID NO: 1, provided that the amino acid sequence comprises mutations of T122S, L153P, V126S, wherein the positions correspond to SEQ ID NO: 1. In some embodiments, the polypeptide having protease activity comprises an amino acid sequence having at least 50%, at least 60%, at least 70%, at least 80%, at least 81%, at least 82%, at least 83%, at least 84%, at least 85%, at least 86%, at least 87%, at least 88%, at least 89%, at least 90%, at least 91%, at least 92%, at least 93%, at least 94%, at least 95%, at least 96%, at least 97%, at least 98%, or at least 99% sequence identity to SEQ ID NO: 1, provided that the amino acid sequence comprises mutations of T122S, S128A, F333N, wherein the positions correspond to SEQ ID NO: 1. In some embodiments, the polypeptide having protease activity comprises an amino acid sequence having at least 50%, at least 60%, at least 70%, at least 80%, at least 81%, at least 82%, at least 83%, at least 84%, at least 85%, at least 86%, at least 87%, at least 88%, at least 89%, at least 90%, at least 91%, at least 92%, at least 93%, at least 94%, at least 95%, at least 96%, at least 97%, at least 98%, or at least 99% sequence identity to SEQ ID NO: 1, provided that the amino acid sequence comprises mutations of E166Q, wherein the positions correspond to SEQ ID NO: 1. In some embodiments, the polypeptide having protease activity comprises an amino acid sequence having at least 50%, at least 60%, at least 70%, at least 80%, at least 81%, at least 82%, at least 83%, at least 84%, at least 85%, at least 86%, at least 87%, at least 88%, at least 89%, at least 90%, at least 91%, at least 92%, at least 93%, at least 94%, at least 95%, at least 96%, at least 97%, at least 98%, or at least 99% sequence identity to SEQ ID NO: 1, provided that the amino acid sequence comprises mutations of K196S, wherein the positions correspond to SEQ ID NO: 1. In some embodiments, the polypeptide having protease activity comprises an amino acid sequence having at least 50%, at least 60%, at least 70%, at least 80%, at least 81%, at least 82%, at least 83%, at least 84%, at least 85%, at least 86%, at least 87%, at least 88%, at least 89%, at least 90%, at least 91%, at least 92%, at least 93%, at least 94%, at least 95%, at least 96%, at least 97%, at least 98%, or at least 99% sequence identity to SEQ ID NO: 1, provided that the amino acid sequence comprises mutations of K196E, wherein the positions correspond to SEQ ID NO: 1. In some embodiments, the polypeptide having protease activity comprises an amino acid sequence having at least 50%, at least 60%, at least 70%, at least 80%, at least 81%, at least 82%, at least 83%, at least 84%, at least 85%, at least 86%, at least 87%, at least 88%, at least 89%, at least 90%, at least 91%, at least 92%, at least 93%, at least 94%, at least 95%, at least 96%, at least 97%, at least 98%, or at least 99% sequence identity to SEQ ID NO: 1, provided that the amino acid sequence comprises mutations of H222Q, wherein the positions correspond to SEQ ID NO: 1. In some embodiments, the polypeptide having protease activity comprises an amino acid sequence having at least 50%, at least 60%, at least 70%, at least 80%, at least 81%, at least 82%, at least 83%, at least 84%, at least 85%, at least 86%, at least 87%, at least 88%, at least 89%, at least 90%, at least 91%, at least 92%, at least 93%, at least 94%, at least 95%, at least 96%, at least 97%, at least 98%, or at least 99% sequence identity to SEQ ID NO: 1, provided that the amino acid sequence comprises mutations of E120G, wherein the positions correspond to SEQ ID NO: 1. In some embodiments, the polypeptide having protease activity comprises an amino acid sequence having at least 50%, at least 60%, at least 70%, at least 80%, at least 81%, at least 82%, at least 83%, at least 84%, at least 85%, at least 86%, at least 87%, at least 88%, at least 89%, at least 90%, at least 91%, at least 92%, at least 93%, at least 94%, at least 95%, at least 96%, at least 97%, at least 98%, or at least 99% sequence identity to SEQ ID NO: 1, provided that the amino acid sequence comprises mutations of K93S, wherein the positions correspond to SEQ ID NO: 1. In some embodiments, the polypeptide having protease activity comprises an amino acid sequence having at least 50%, at least 60%, at least 70%, at least 80%, at least 81%, at least 82%, at least 83%, at least 84%, at least 85%, at least 86%, at least 87%, at least 88%, at least 89%, at least 90%, at least 91%, at least 92%, at least 93%, at least 94%, at least 95%, at least 96%, at least 97%, at least 98%, or at least 99% sequence identity to SEQ ID NO: 1, provided that the amino acid sequence comprises mutations of T122S, wherein the positions correspond to SEQ ID NO: 1. In some embodiments, the polypeptide having protease activity comprises an amino acid sequence having at least 50%, at least 60%, at least 70%, at least 80%, at least 81%, at least 82%, at least 83%, at least 84%, at least 85%, at least 86%, at least 87%, at least 88%, at least 89%, at least 90%, at least 91%, at least 92%, at least 93%, at least 94%, at least 95%, at least 96%, at least 97%, at least 98%, or at least 99% sequence identity to SEQ ID NO: 1, provided that the amino acid sequence comprises mutations of K229E, wherein the positions correspond to SEQ ID NO: 1. In some embodiments, the polypeptide having protease activity comprises an amino acid sequence having at least 50%, at least 60%, at least 70%, at least 80%, at least 81%, at least 82%, at least 83%, at least 84%, at least 85%, at least 86%, at least 87%, at least 88%, at least 89%, at least 90%, at least 91%, at least 92%, at least 93%, at least 94%, at least 95%, at least 96%, at least 97%, at least 98%, or at least 99% sequence identity to SEQ ID NO: 1, provided that the amino acid sequence comprises mutations of N162E, wherein the positions correspond to SEQ ID NO: 1. In some embodiments, the polypeptide having protease activity comprises an amino acid sequence having at least 50%, at least 60%, at least 70%, at least 80%, at least 81%, at least 82%, at least 83%, at least 84%, at least 85%, at least 86%, at least 87%, at least 88%, at least 89%, at least 90%, at least 91%, at least 92%, at least 93%, at least 94%, at least 95%, at least 96%, at least 97%, at least 98%, or at least 99% sequence identity to SEQ ID NO: 1, provided that the amino acid sequence comprises mutations of R280E, wherein the positions correspond to SEQ ID NO: 1. In some embodiments, the polypeptide having protease activity comprises an amino acid sequence having at least 50%, at least 60%, at least 70%, at least 80%, at least 81%, at least 82%, at least 83%, at least 84%, at least 85%, at least 86%, at least 87%, at least 88%, at least 89%, at least 90%, at least 91%, at least 92%, at least 93%, at least 94%, at least 95%, at least 96%, at least 97%, at least 98%, or at least 99% sequence identity to SEQ ID NO: 1, provided that the amino acid sequence comprises mutations of K318G, wherein the positions correspond to SEQ ID NO: 1. In some embodiments, the polypeptide having protease activity comprises an amino acid sequence having at least 50%, at least 60%, at least 70%, at least 80%, at least 81%, at least 82%, at least 83%, at least 84%, at least 85%, at least 86%, at least 87%, at least 88%, at least 89%, at least 90%, at least 91%, at least 92%, at least 93%, at least 94%, at least 95%, at least 96%, at least 97%, at least 98%, or at least 99% sequence identity to SEQ ID NO: 1, provided that the amino acid sequence comprises mutations of K318A, wherein the positions correspond to SEQ ID NO: 1. In some embodiments, the polypeptide having protease activity comprises an amino acid sequence having at least 50%, at least 60%, at least 70%, at least 80%, at least 81%, at least 82%, at least 83%, at least 84%, at least 85%, at least 86%, at least 87%, at least 88%, at least 89%, at least 90%, at least 91%, at least 92%, at least 93%, at least 94%, at least 95%, at least 96%, at least 97%, at least 98%, or at least 99% sequence identity to SEQ ID NO: 1, provided that the amino acid sequence comprises mutations of T122S, S128A, L153P, wherein the positions correspond to SEQ ID NO: 1. In some embodiments, the polypeptide having protease activity comprises an amino acid sequence having at least 50%, at least 60%, at least 70%, at least 80%, at least 81%, at least 82%, at least 83%, at least 84%, at least 85%, at least 86%, at least 87%, at least 88%, at least 89%, at least 90%, at least 91%, at least 92%, at least 93%, at least 94%, at least 95%, at least 96%, at least 97%, at least 98%, or at least 99% sequence identity to SEQ ID NO: 1, provided that the amino acid sequence comprises mutations of T122S, S128A, L153P, F333N, wherein the positions correspond to SEQ ID NO: 1. In some embodiments, the polypeptide having protease activity comprises an amino acid sequence having at least 50%, at least 60%, at least 70%, at least 80%, at least 81%, at least 82%, at least 83%, at least 84%, at least 85%, at least 86%, at least 87%, at least 88%, at least 89%, at least 90%, at least 91%, at least 92%, at least 93%, at least 94%, at least 95%, at least 96%, at least 97%, at least 98%, or at least 99% sequence identity to SEQ ID NO: 1, provided that the amino acid sequence comprises mutations of D71E, A79V, T122S, S128A, L153P, F333N, wherein the positions correspond to SEQ ID NO: 1. In some embodiments, the polypeptide having protease activity comprises an amino acid sequence having at least 50%, at least 60%, at least 70%, at least 80%, at least 81%, at least 82%, at least 83%, at least 84%, at least 85%, at least 86%, at least 87%, at least 88%, at least 89%, at least 90%, at least 91%, at least 92%, at least 93%, at least 94%, at least 95%, at least 96%, at least 97%, at least 98%, or at least 99% sequence identity to SEQ ID NO: 1, provided that the amino acid sequence comprises mutations of A79V, T122S, S128A, L153P, R189K, F333N, wherein the positions correspond to SEQ ID NO: 1. In some embodiments, the polypeptide having protease activity comprises an amino acid sequence having at least 50%, at least 60%, at least 70%, at least 80%, at least 81%, at least 82%, at least 83%, at least 84%, at least 85%, at least 86%, at least 87%, at least 88%, at least 89%, at least 90%, at least 91%, at least 92%, at least 93%, at least 94%, at least 95%, at least 96%, at least 97%, at least 98%, or at least 99% sequence identity to SEQ ID NO: 1, provided that the amino acid sequence comprises mutations of A79V, T122S, S128A, L153P, H222Q, F333N, wherein the positions correspond to SEQ ID NO: 1. In some embodiments, the polypeptide having protease activity comprises an amino acid sequence having at least 50%, at least 60%, at least 70%, at least 80%, at least 81%, at least 82%, at least 83%, at least 84%, at least 85%, at least 86%, at least 87%, at least 88%, at least 89%, at least 90%, at least 91%, at least 92%, at least 93%, at least 94%, at least 95%, at least 96%, at least 97%, at least 98%, or at least 99% sequence identity to SEQ ID NO: 1, provided that the amino acid sequence comprises mutations of T122S, S128A, L153P, R189K, H222Q, F333N, wherein the positions correspond to SEQ ID NO: 1. In some embodiments, the polypeptide having protease activity comprises an amino acid sequence having at least 50%, at least 60%, at least 70%, at least 80%, at least 81%, at least 82%, at least 83%, at least 84%, at least 85%, at least 86%, at least 87%, at least 88%, at least 89%, at least 90%, at least 91%, at least 92%, at least 93%, at least 94%, at least 95%, at least 96%, at least 97%, at least 98%, or at least 99% sequence identity to SEQ ID NO: 1, provided that the amino acid sequence comprises mutations of A79V, T122S, S128A, L153P, A167T, F333N, wherein the positions correspond to SEQ ID NO: 1. In some embodiments, the polypeptide having protease activity comprises an amino acid sequence having at least 50%, at least 60%, at least 70%, at least 80%, at least 81%, at least 82%, at least 83%, at least 84%, at least 85%, at least 86%, at least 87%, at least 88%, at least 89%, at least 90%, at least 91%, at least 92%, at least 93%, at least 94%, at least 95%, at least 96%, at least 97%, at least 98%, or at least 99% sequence identity to SEQ ID NO: 1, provided that the amino acid sequence comprises mutations of A79V, T122S, S128A, L153P, R189K, H222Q, wherein the positions correspond to SEQ ID NO: 1. In some embodiments, the polypeptide having protease activity comprises an amino acid sequence having at least 50%, at least 60%, at least 70%, at least 80%, at least 81%, at least 82%, at least 83%, at least 84%, at least 85%, at least 86%, at least 87%, at least 88%, at least 89%, at least 90%, at least 91%, at least 92%, at least 93%, at least 94%, at least 95%, at least 96%, at least 97%, at least 98%, or at least 99% sequence identity to SEQ ID NO: 1, provided that the amino acid sequence comprises mutations of A79V, T122S, S128A, L153P, A167T, H222Q, wherein the positions correspond to SEQ ID NO: 1. In some embodiments, the polypeptide having protease activity comprises an amino acid sequence having at least 50%, at least 60%, at least 70%, at least 80%, at least 81%, at least 82%, at least 83%, at least 84%, at least 85%, at least 86%, at least 87%, at least 88%, at least 89%, at least 90%, at least 91%, at least 92%, at least 93%, at least 94%, at least 95%, at least 96%, at least 97%, at least 98%, or at least 99% sequence identity to SEQ ID NO: 1, provided that the amino acid sequence comprises mutations of A79V, V102A, T122S, S128A, L153P, A167T, wherein the positions correspond to SEQ ID NO: 1. In some embodiments, the polypeptide having protease activity comprises an amino acid sequence having at least 50%, at least 60%, at least 70%, at least 80%, at least 81%, at least 82%, at least 83%, at least 84%, at least 85%, at least 86%, at least 87%, at least 88%, at least 89%, at least 90%, at least 91%, at least 92%, at least 93%, at least 94%, at least 95%, at least 96%, at least 97%, at least 98%, or at least 99% sequence identity to SEQ ID NO: 1, provided that the amino acid sequence comprises mutations of D71E, A79V, T122S, S128A, L153P, A167T, wherein the positions correspond to SEQ ID NO: 1. In some embodiments, the polypeptide having protease activity comprises an amino acid sequence having at least 50%, at least 60%, at least 70%, at least 80%, at least 81%, at least 82%, at least 83%, at least 84%, at least 85%, at least 86%, at least 87%, at least 88%, at least 89%, at least 90%, at least 91%, at least 92%, at least 93%, at least 94%, at least 95%, at least 96%, at least 97%, at least 98%, or at least 99% sequence identity to SEQ ID NO: 1, provided that the amino acid sequence comprises mutations of T122S, S128A, L153P, N162E, F333N, wherein the positions correspond to SEQ ID NO: 1. In some embodiments, the polypeptide having protease activity comprises an amino acid sequence having at least 50%, at least 60%, at least 70%, at least 80%, at least 81%, at least 82%, at least 83%, at least 84%, at least 85%, at least 86%, at least 87%, at least 88%, at least 89%, at least 90%, at least 91%, at least 92%, at least 93%, at least 94%, at least 95%, at least 96%, at least 97%, at least 98%, or at least 99% sequence identity to SEQ ID NO: 1, provided that the amino acid sequence comprises mutations of T122S, S128A, L153P, K318A, F333N, wherein the positions correspond to SEQ ID NO: 1. In some embodiments, the polypeptide having protease activity comprises an amino acid sequence having at least 50%, at least 60%, at least 70%, at least 80%, at least 81%, at least 82%, at least 83%, at least 84%, at least 85%, at least 86%, at least 87%, at least 88%, at least 89%, at least 90%, at least 91%, at least 92%, at least 93%, at least 94%, at least 95%, at least 96%, at least 97%, at least 98%, or at least 99% sequence identity to SEQ ID NO: 1, provided that the amino acid sequence comprises mutations of T122S, S128A, L153P, H222Q, K229E, R280E, F333N, wherein the positions correspond to SEQ ID NO: 1. In some embodiments, the polypeptide having protease activity comprises an amino acid sequence having at least 50%, at least 60%, at least 70%, at least 80%, at least 81%, at least 82%, at least 83%, at least 84%, at least 85%, at least 86%, at least 87%, at least 88%, at least 89%, at least 90%, at least 91%, at least 92%, at least 93%, at least 94%, at least 95%, at least 96%, at least 97%, at least 98%, or at least 99% sequence identity to SEQ ID NO: 1, provided that the amino acid sequence comprises mutations of S128A, L153P, H222Q, K229E, F333N, wherein the positions correspond to SEQ ID NO: 1. In some embodiments, the polypeptide having protease activity comprises an amino acid sequence having at least 50%, at least 60%, at least 70%, at least 80%, at least 81%, at least 82%, at least 83%, at least 84%, at least 85%, at least 86%, at least 87%, at least 88%, at least 89%, at least 90%, at least 91%, at least 92%, at least 93%, at least 94%, at least 95%, at least 96%, at least 97%, at least 98%, or at least 99% sequence identity to SEQ ID NO: 1, provided that the amino acid sequence comprises mutations of S128A, L153P, H222Q, R280E, F333N, wherein the positions correspond to SEQ ID NO: 1. In some embodiments, the polypeptide having protease activity comprises an amino acid sequence having at least 50%, at least 60%, at least 70%, at least 80%, at least 81%, at least 82%, at least 83%, at least 84%, at least 85%, at least 86%, at least 87%, at least 88%, at least 89%, at least 90%, at least 91%, at least 92%, at least 93%, at least 94%, at least 95%, at least 96%, at least 97%, at least 98%, or at least 99% sequence identity to SEQ ID NO: 1, provided that the amino acid sequence comprises mutations of S128A, L153P, K229E, R280E, F333N, wherein the positions correspond to SEQ ID NO: 1. In some embodiments, the polypeptide having protease activity comprises an amino acid sequence having at least 50%, at least 60%, at least 70%, at least 80%, at least 81%, at least 82%, at least 83%, at least 84%, at least 85%, at least 86%, at least 87%, at least 88%, at least 89%, at least 90%, at least 91%, at least 92%, at least 93%, at least 94%, at least 95%, at least 96%, at least 97%, at least 98%, or at least 99% sequence identity to SEQ ID NO: 1, provided that the amino acid sequence comprises mutations of T122S, S128A, L153P, N162E, H222Q, K229E, R280E, F333N, wherein the positions correspond to SEQ ID NO: 1. In some embodiments, the polypeptide having protease activity comprises an amino acid sequence having at least 50%, at least 60%, at least 70%, at least 80%, at least 81%, at least 82%, at least 83%, at least 84%, at least 85%, at least 86%, at least 87%, at least 88%, at least 89%, at least 90%, at least 91%, at least 92%, at least 93%, at least 94%, at least 95%, at least 96%, at least 97%, at least 98%, or at least 99% sequence identity to SEQ ID NO: 1, provided that the amino acid sequence comprises mutations of S128A, L153P, N162E, K196S, F333N, wherein the positions correspond to SEQ ID NO: 1. In some embodiments, the polypeptide having protease activity comprises an amino acid sequence having at least 50%, at least 60%, at least 70%, at least 80%, at least 81%, at least 82%, at least 83%, at least 84%, at least 85%, at least 86%, at least 87%, at least 88%, at least 89%, at least 90%, at least 91%, at least 92%, at least 93%, at least 94%, at least 95%, at least 96%, at least 97%, at least 98%, or at least 99% sequence identity to SEQ ID NO: 1, provided that the amino acid sequence comprises mutations of S128A, L153P, N162E, H222Q, F333N, wherein the positions correspond to SEQ ID NO: 1. In some embodiments, the polypeptide having protease activity comprises an amino acid sequence having at least 50%, at least 60%, at least 70%, at least 80%, at least 81%, at least 82%, at least 83%, at least 84%, at least 85%, at least 86%, at least 87%, at least 88%, at least 89%, at least 90%, at least 91%, at least 92%, at least 93%, at least 94%, at least 95%, at least 96%, at least 97%, at least 98%, or at least 99% sequence identity to SEQ ID NO: 1, provided that the amino acid sequence comprises mutations of S128A, L153P, N162E, K229E, F333N, wherein the positions correspond to SEQ ID NO: 1. In some embodiments, the polypeptide having protease activity comprises an amino acid sequence having at least 50%, at least 60%, at least 70%, at least 80%, at least 81%, at least 82%, at least 83%, at least 84%, at least 85%, at least 86%, at least 87%, at least 88%, at least 89%, at least 90%, at least 91%, at least 92%, at least 93%, at least 94%, at least 95%, at least 96%, at least 97%, at least 98%, or at least 99% sequence identity to SEQ ID NO: 1, provided that the amino acid sequence comprises mutations of S128A, L153P, N162E, R280E, F333N, wherein the positions correspond to SEQ ID NO: 1. In some embodiments, the polypeptide having protease activity comprises an amino acid sequence having at least 50%, at least 60%, at least 70%, at least 80%, at least 81%, at least 82%, at least 83%, at least 84%, at least 85%, at least 86%, at least 87%, at least 88%, at least 89%, at least 90%, at least 91%, at least 92%, at least 93%, at least 94%, at least 95%, at least 96%, at least 97%, at least 98%, or at least 99% sequence identity to SEQ ID NO: 1, provided that the amino acid sequence comprises mutations of S128A, L153P, N162E, K318A, F333N, wherein the positions correspond to SEQ ID NO: 1. In some embodiments, the polypeptide having protease activity comprises an amino acid sequence having at least 50%, at least 60%, at least 70%, at least 80%, at least 81%, at least 82%, at least 83%, at least 84%, at least 85%, at least 86%, at least 87%, at least 88%, at least 89%, at least 90%, at least 91%, at least 92%, at least 93%, at least 94%, at least 95%, at least 96%, at least 97%, at least 98%, or at least 99% sequence identity to SEQ ID NO: 1, provided that the amino acid sequence comprises mutations of S128A, L153P, N162E, K196S, K318A, F333N, wherein the positions correspond to SEQ ID NO: 1. In some embodiments, the polypeptide having protease activity comprises an amino acid sequence having at least 50%, at least 60%, at least 70%, at least 80%, at least 81%, at least 82%, at least 83%, at least 84%, at least 85%, at least 86%, at least 87%, at least 88%, at least 89%, at least 90%, at least 91%, at least 92%, at least 93%, at least 94%, at least 95%, at least 96%, at least 97%, at least 98%, or at least 99% sequence identity to SEQ ID NO: 1, provided that the amino acid sequence comprises mutations of S128A, L153P, K196S, K318A, F333N, wherein the positions correspond to SEQ ID NO: 1. In some embodiments, the polypeptide having protease activity comprises an amino acid sequence having at least 50%, at least 60%, at least 70%, at least 80%, at least 81%, at least 82%, at least 83%, at least 84%, at least 85%, at least 86%, at least 87%, at least 88%, at least 89%, at least 90%, at least 91%, at least 92%, at least 93%, at least 94%, at least 95%, at least 96%, at least 97%, at least 98%, or at least 99% sequence identity to SEQ ID NO: 1, provided that the amino acid sequence comprises mutations of S128A, L153P, N162E, F333N, wherein the positions correspond to SEQ ID NO: 1. In some embodiments, the polypeptide having protease activity comprises an amino acid sequence having at least 50%, at least 60%, at least 70%, at least 80%, at least 81%, at least 82%, at least 83%, at least 84%, at least 85%, at least 86%, at least 87%, at least 88%, at least 89%, at least 90%, at least 91%, at least 92%, at least 93%, at least 94%, at least 95%, at least 96%, at least 97%, at least 98%, or at least 99% sequence identity to SEQ ID NO: 1, provided that the amino acid sequence comprises mutations of S128A, L153P, K196S, F333N, wherein the positions correspond to SEQ ID NO: 1. In some embodiments, the polypeptide having protease activity comprises an amino acid sequence having at least 50%, at least 60%, at least 70%, at least 80%, at least 81%, at least 82%, at least 83%, at least 84%, at least 85%, at least 86%, at least 87%, at least 88%, at least 89%, at least 90%, at least 91%, at least 92%, at least 93%, at least 94%, at least 95%, at least 96%, at least 97%, at least 98%, or at least 99% sequence identity to SEQ ID NO: 1, provided that the amino acid sequence comprises mutations of S128A, L153P, K318A, F333N, wherein the positions correspond to SEQ ID NO: 1. In some embodiments, the polypeptide having protease activity comprises an amino acid sequence having at least 50%, at least 60%, at least 70%, at least 80%, at least 81%, at least 82%, at least 83%, at least 84%, at least 85%, at least 86%, at least 87%, at least 88%, at least 89%, at least 90%, at least 91%, at least 92%, at least 93%, at least 94%, at least 95%, at least 96%, at least 97%, at least 98%, or at least 99% sequence identity to SEQ ID NO: 1, provided that the amino acid sequence comprises mutations of S128A, L153P, K196S, E310Q, K318A, F333N, wherein the positions correspond to SEQ ID NO: 1. In some embodiments, the polypeptide having protease activity comprises an amino acid sequence having at least 50%, at least 60%, at least 70%, at least 80%, at least 81%, at least 82%, at least 83%, at least 84%, at least 85%, at least 86%, at least 87%, at least 88%, at least 89%, at least 90%, at least 91%, at least 92%, at least 93%, at least 94%, at least 95%, at least 96%, at least 97%, at least 98%, or at least 99% sequence identity to SEQ ID NO: 1, provided that the amino acid sequence comprises mutations of S128A, L153P, N162E, K196S, E310Q, K318A, F333N, wherein the positions correspond to SEQ ID NO: 1. In some embodiments, the polypeptide having protease activity comprises an amino acid sequence having at least 50%, at least 60%, at least 70%, at least 80%, at least 81%, at least 82%, at least 83%, at least 84%, at least 85%, at least 86%, at least 87%, at least 88%, at least 89%, at least 90%, at least 91%, at least 92%, at least 93%, at least 94%, at least 95%, at least 96%, at least 97%, at least 98%, or at least 99% sequence identity to SEQ ID NO: 1, provided that the amino acid sequence comprises mutations of T122S, S128A, L153P, N162E, wherein the positions correspond to SEQ ID NO: 1. In some embodiments, the polypeptide having protease activity comprises an amino acid sequence having at least 50%, at least 60%, at least 70%, at least 80%, at least 81%, at least 82%, at least 83%, at least 84%, at least 85%, at least 86%, at least 87%, at least 88%, at least 89%, at least 90%, at least 91%, at least 92%, at least 93%, at least 94%, at least 95%, at least 96%, at least 97%, at least 98%, or at least 99% sequence identity to SEQ ID NO: 1, provided that the amino acid sequence comprises mutations of T122S, S128A, L153P, K318A, wherein the positions correspond to SEQ ID NO: 1. In some embodiments, the polypeptide having protease activity comprises an amino acid sequence having at least 50%, at least 60%, at least 70%, at least 80%, at least 81%, at least 82%, at least 83%, at least 84%, at least 85%, at least 86%, at least 87%, at least 88%, at least 89%, at least 90%, at least 91%, at least 92%, at least 93%, at least 94%, at least 95%, at least 96%, at least 97%, at least 98%, or at least 99% sequence identity to SEQ ID NO: 1, provided that the amino acid sequence comprises mutations of T122S, S128A, L153P, H222Q, K229E, R280E, wherein the positions correspond to SEQ ID NO: 1. In some embodiments, the polypeptide having protease activity comprises an amino acid sequence having at least 50%, at least 60%, at least 70%, at least 80%, at least 81%, at least 82%, at least 83%, at least 84%, at least 85%, at least 86%, at least 87%, at least 88%, at least 89%, at least 90%, at least 91%, at least 92%, at least 93%, at least 94%, at least 95%, at least 96%, at least 97%, at least 98%, or at least 99% sequence identity to SEQ ID NO: 1, provided that the amino acid sequence comprises mutations of T122S, S128A, L153P, H222Q, K229E, wherein the positions correspond to SEQ ID NO: 1. In some embodiments, the polypeptide having protease activity comprises an amino acid sequence having at least 50%, at least 60%, at least 70%, at least 80%, at least 81%, at least 82%, at least 83%, at least 84%, at least 85%, at least 86%, at least 87%, at least 88%, at least 89%, at least 90%, at least 91%, at least 92%, at least 93%, at least 94%, at least 95%, at least 96%, at least 97%, at least 98%, or at least 99% sequence identity to SEQ ID NO: 1, provided that the amino acid sequence comprises mutations of T122S, S128A, L153P, H222Q, R280E, wherein the positions correspond to SEQ ID NO: 1. In some embodiments, the polypeptide having protease activity comprises an amino acid sequence having at least 50%, at least 60%, at least 70%, at least 80%, at least 81%, at least 82%, at least 83%, at least 84%, at least 85%, at least 86%, at least 87%, at least 88%, at least 89%, at least 90%, at least 91%, at least 92%, at least 93%, at least 94%, at least 95%, at least 96%, at least 97%, at least 98%, or at least 99% sequence identity to SEQ ID NO: 1, provided that the amino acid sequence comprises mutations of T122S, S128A, L153P, K229E, R280E, wherein the positions correspond to SEQ ID NO: 1. In some embodiments, the polypeptide having protease activity comprises an amino acid sequence having at least 50%, at least 60%, at least 70%, at least 80%, at least 81%, at least 82%, at least 83%, at least 84%, at least 85%, at least 86%, at least 87%, at least 88%, at least 89%, at least 90%, at least 91%, at least 92%, at least 93%, at least 94%, at least 95%, at least 96%, at least 97%, at least 98%, or at least 99% sequence identity to SEQ ID NO: 1, provided that the amino acid sequence comprises mutations of T122S, S128A, L153P, N162E, H222Q, K229E, R280E, wherein the positions correspond to SEQ ID NO: 1. In some embodiments, the polypeptide having protease activity comprises an amino acid sequence having at least 50%, at least 60%, at least 70%, at least 80%, at least 81%, at least 82%, at least 83%, at least 84%, at least 85%, at least 86%, at least 87%, at least 88%, at least 89%, at least 90%, at least 91%, at least 92%, at least 93%, at least 94%, at least 95%, at least 96%, at least 97%, at least 98%, or at least 99% sequence identity to SEQ ID NO: 1, provided that the amino acid sequence comprises mutations of T122S, S128A, L153P, N162E, K196S, wherein the positions correspond to SEQ ID NO: 1. In some embodiments, the polypeptide having protease activity comprises an amino acid sequence having at least 50%, at least 60%, at least 70%, at least 80%, at least 81%, at least 82%, at least 83%, at least 84%, at least 85%, at least 86%, at least 87%, at least 88%, at least 89%, at least 90%, at least 91%, at least 92%, at least 93%, at least 94%, at least 95%, at least 96%, at least 97%, at least 98%, or at least 99% sequence identity to SEQ ID NO: 1, provided that the amino acid sequence comprises mutations of T122S, S128A, L153P, N162E, H222Q, wherein the positions correspond to SEQ ID NO: 1. In some embodiments, the polypeptide having protease activity comprises an amino acid sequence having at least 50%, at least 60%, at least 70%, at least 80%, at least 81%, at least 82%, at least 83%, at least 84%, at least 85%, at least 86%, at least 87%, at least 88%, at least 89%, at least 90%, at least 91%, at least 92%, at least 93%, at least 94%, at least 95%, at least 96%, at least 97%, at least 98%, or at least 99% sequence identity to SEQ ID NO: 1, provided that the amino acid sequence comprises mutations of T122S, S128A, L153P, N162E, K229E, wherein the positions correspond to SEQ ID NO: 1. In some embodiments, the polypeptide having protease activity comprises an amino acid sequence having at least 50%, at least 60%, at least 70%, at least 80%, at least 81%, at least 82%, at least 83%, at least 84%, at least 85%, at least 86%, at least 87%, at least 88%, at least 89%, at least 90%, at least 91%, at least 92%, at least 93%, at least 94%, at least 95%, at least 96%, at least 97%, at least 98%, or at least 99% sequence identity to SEQ ID NO: 1, provided that the amino acid sequence comprises mutations of T122S, S128A, L153P, N162E, R280E, wherein the positions correspond to SEQ ID NO: 1. In some embodiments, the polypeptide having protease activity comprises an amino acid sequence having at least 50%, at least 60%, at least 70%, at least 80%, at least 81%, at least 82%, at least 83%, at least 84%, at least 85%, at least 86%, at least 87%, at least 88%, at least 89%, at least 90%, at least 91%, at least 92%, at least 93%, at least 94%, at least 95%, at least 96%, at least 97%, at least 98%, or at least 99% sequence identity to SEQ ID NO: 1, provided that the amino acid sequence comprises mutations of T122S, S128A, L153P, N162E, K318A, wherein the positions correspond to SEQ ID NO: 1. In some embodiments, the polypeptide having protease activity comprises an amino acid sequence having at least 50%, at least 60%, at least 70%, at least 80%, at least 81%, at least 82%, at least 83%, at least 84%, at least 85%, at least 86%, at least 87%, at least 88%, at least 89%, at least 90%, at least 91%, at least 92%, at least 93%, at least 94%, at least 95%, at least 96%, at least 97%, at least 98%, or at least 99% sequence identity to SEQ ID NO: 1, provided that the amino acid sequence comprises mutations of T122S, S128A, L153P, N162E, K196S, K318A, wherein the positions correspond to SEQ ID NO: 1. In some embodiments, the polypeptide having protease activity comprises an amino acid sequence having at least 50%, at least 60%, at least 70%, at least 80%, at least 81%, at least 82%, at least 83%, at least 84%, at least 85%, at least 86%, at least 87%, at least 88%, at least 89%, at least 90%, at least 91%, at least 92%, at least 93%, at least 94%, at least 95%, at least 96%, at least 97%, at least 98%, or at least 99% sequence identity to SEQ ID NO: 1, provided that the amino acid sequence comprises mutations of T122S, S128A, L153P, K196S, K318A, wherein the positions correspond to SEQ ID NO: 1. In some embodiments, the polypeptide having protease activity comprises an amino acid sequence having at least 50%, at least 60%, at least 70%, at least 80%, at least 81%, at least 82%, at least 83%, at least 84%, at least 85%, at least 86%, at least 87%, at least 88%, at least 89%, at least 90%, at least 91%, at least 92%, at least 93%, at least 94%, at least 95%, at least 96%, at least 97%, at least 98%, or at least 99% sequence identity to SEQ ID NO: 1, provided that the amino acid sequence comprises mutations of T122S, S128A, L153P, K196S, wherein the positions correspond to SEQ ID NO: 1. In some embodiments, the polypeptide having protease activity comprises an amino acid sequence having at least 50%, at least 60%, at least 70%, at least 80%, at least 81%, at least 82%, at least 83%, at least 84%, at least 85%, at least 86%, at least 87%, at least 88%, at least 89%, at least 90%, at least 91%, at least 92%, at least 93%, at least 94%, at least 95%, at least 96%, at least 97%, at least 98%, or at least 99% sequence identity to SEQ ID NO: 1, provided that the amino acid sequence comprises mutations of T122S, S128A, L153P, K196S, Y212F, K318A, wherein the positions correspond to SEQ ID NO: 1. In some embodiments, the polypeptide having protease activity comprises an amino acid sequence having at least 50%, at least 60%, at least 70%, at least 80%, at least 81%, at least 82%, at least 83%, at least 84%, at least 85%, at least 86%, at least 87%, at least 88%, at least 89%, at least 90%, at least 91%, at least 92%, at least 93%, at least 94%, at least 95%, at least 96%, at least 97%, at least 98%, or at least 99% sequence identity to SEQ ID NO: 1, provided that the amino acid sequence comprises mutations of T122S, S128A, L153P, K196S, E310Q, K318A, wherein the positions correspond to SEQ ID NO: 1. In some embodiments, the polypeptide having protease activity comprises an amino acid sequence having at least 50%, at least 60%, at least 70%, at least 80%, at least 81%, at least 82%, at least 83%, at least 84%, at least 85%, at least 86%, at least 87%, at least 88%, at least 89%, at least 90%, at least 91%, at least 92%, at least 93%, at least 94%, at least 95%, at least 96%, at least 97%, at least 98%, or at least 99% sequence identity to SEQ ID NO: 1, provided that the amino acid sequence comprises mutations of T122S, S128A, L153P, N162E, K196S, E310Q, K318A, wherein the positions correspond to SEQ ID NO: 1. In some embodiments, the polypeptide having protease activity comprises an amino acid sequence having at least 50%, at least 60%, at least 70%, at least 80%, at least 81%, at least 82%, at least 83%, at least 84%, at least 85%, at least 86%, at least 87%, at least 88%, at least 89%, at least 90%, at least 91%, at least 92%, at least 93%, at least 94%, at least 95%, at least 96%, at least 97%, at least 98%, or at least 99% sequence identity to SEQ ID NO: 1, provided that the amino acid sequence comprises mutations of S128A, L153P, E166D, F333N, wherein the positions correspond to SEQ ID NO: 1. In some embodiments, the polypeptide having protease activity comprises an amino acid sequence having at least 50%, at least 60%, at least 70%, at least 80%, at least 81%, at least 82%, at least 83%, at least 84%, at least 85%, at least 86%, at least 87%, at least 88%, at least 89%, at least 90%, at least 91%, at least 92%, at least 93%, at least 94%, at least 95%, at least 96%, at least 97%, at least 98%, or at least 99% sequence identity to SEQ ID NO: 1, provided that the amino acid sequence comprises mutations of S128A, L153P, K196T, F333N, wherein the positions correspond to SEQ ID NO: 1. In some embodiments, the polypeptide having protease activity comprises an amino acid sequence having at least 50%, at least 60%, at least 70%, at least 80%, at least 81%, at least 82%, at least 83%, at least 84%, at least 85%, at least 86%, at least 87%, at least 88%, at least 89%, at least 90%, at least 91%, at least 92%, at least 93%, at least 94%, at least 95%, at least 96%, at least 97%, at least 98%, or at least 99% sequence identity to SEQ ID NO: 1, provided that the amino acid sequence comprises mutations of S128A, L153P, K196D, F333N, wherein the positions correspond to SEQ ID NO: 1. In some embodiments, the polypeptide having protease activity comprises an amino acid sequence having at least 50%, at least 60%, at least 70%, at least 80%, at least 81%, at least 82%, at least 83%, at least 84%, at least 85%, at least 86%, at least 87%, at least 88%, at least 89%, at least 90%, at least 91%, at least 92%, at least 93%, at least 94%, at least 95%, at least 96%, at least 97%, at least 98%, or at least 99% sequence identity to SEQ ID NO: 1, provided that the amino acid sequence comprises mutations of S128A, L153P, K196N, F333N, wherein the positions correspond to SEQ ID NO: 1. In some embodiments, the polypeptide having protease activity comprises an amino acid sequence having at least 50%, at least 60%, at least 70%, at least 80%, at least 81%, at least 82%, at least 83%, at least 84%, at least 85%, at least 86%, at least 87%, at least 88%, at least 89%, at least 90%, at least 91%, at least 92%, at least 93%, at least 94%, at least 95%, at least 96%, at least 97%, at least 98%, or at least 99% sequence identity to SEQ ID NO: 1, provided that the amino acid sequence comprises mutations of S128A, L153P, H222S, F333N, wherein the positions correspond to SEQ ID NO: 1. In some embodiments, the polypeptide having protease activity comprises an amino acid sequence having at least 50%, at least 60%, at least 70%, at least 80%, at least 81%, at least 82%, at least 83%, at least 84%, at least 85%, at least 86%, at least 87%, at least 88%, at least 89%, at least 90%, at least 91%, at least 92%, at least 93%, at least 94%, at least 95%, at least 96%, at least 97%, at least 98%, or at least 99% sequence identity to SEQ ID NO: 1, provided that the amino acid sequence comprises mutations of S128A, L153P, H222E, F333N, wherein the positions correspond to SEQ ID NO: 1. In some embodiments, the polypeptide having protease activity comprises an amino acid sequence having at least 50%, at least 60%, at least 70%, at least 80%, at least 81%, at least 82%, at least 83%, at least 84%, at least 85%, at least 86%, at least 87%, at least 88%, at least 89%, at least 90%, at least 91%, at least 92%, at least 93%, at least 94%, at least 95%, at least 96%, at least 97%, at least 98%, or at least 99% sequence identity to SEQ ID NO: 1, provided that the amino acid sequence comprises mutations of S128A, L153P, H222T, F333N, wherein the positions correspond to SEQ ID NO: 1. In some embodiments, the polypeptide having protease activity comprises an amino acid sequence having at least 50%, at least 60%, at least 70%, at least 80%, at least 81%, at least 82%, at least 83%, at least 84%, at least 85%, at least 86%, at least 87%, at least 88%, at least 89%, at least 90%, at least 91%, at least 92%, at least 93%, at least 94%, at least 95%, at least 96%, at least 97%, at least 98%, or at least 99% sequence identity to SEQ ID NO: 1, provided that the amino acid sequence comprises mutations of E120D, S128A, L153P, F333N, wherein the positions correspond to SEQ ID NO: 1. In some embodiments, the polypeptide having protease activity comprises an amino acid sequence having at least 50%, at least 60%, at least 70%, at least 80%, at least 81%, at least 82%, at least 83%, at least 84%, at least 85%, at least 86%, at least 87%, at least 88%, at least 89%, at least 90%, at least 91%, at least 92%, at least 93%, at least 94%, at least 95%, at least 96%, at least 97%, at least 98%, or at least 99% sequence identity to SEQ ID NO: 1, provided that the amino acid sequence comprises mutations of T122E, S128A, L153P, F333N, wherein the positions correspond to SEQ ID NO: 1. In some embodiments, the polypeptide having protease activity comprises an amino acid sequence having at least 50%, at least 60%, at least 70%, at least 80%, at least 81%, at least 82%, at least 83%, at least 84%, at least 85%, at least 86%, at least 87%, at least 88%, at least 89%, at least 90%, at least 91%, at least 92%, at least 93%, at least 94%, at least 95%, at least 96%, at least 97%, at least 98%, or at least 99% sequence identity to SEQ ID NO: 1, provided that the amino acid sequence comprises mutations of T122N, S128A, L153P, F333N, wherein the positions correspond to SEQ ID NO: 1. In some embodiments, the polypeptide having protease activity comprises an amino acid sequence having at least 50%, at least 60%, at least 70%, at least 80%, at least 81%, at least 82%, at least 83%, at least 84%, at least 85%, at least 86%, at least 87%, at least 88%, at least 89%, at least 90%, at least 91%, at least 92%, at least 93%, at least 94%, at least 95%, at least 96%, at least 97%, at least 98%, or at least 99% sequence identity to SEQ ID NO: 1, provided that the amino acid sequence comprises mutations of S128A, L153P, K229D, F333N, wherein the positions correspond to SEQ ID NO: 1. In some embodiments, the polypeptide having protease activity comprises an amino acid sequence having at least 50%, at least 60%, at least 70%, at least 80%, at least 81%, at least 82%, at least 83%, at least 84%, at least 85%, at least 86%, at least 87%, at least 88%, at least 89%, at least 90%, at least 91%, at least 92%, at least 93%, at least 94%, at least 95%, at least 96%, at least 97%, at least 98%, or at least 99% sequence identity to SEQ ID NO: 1, provided that the amino acid sequence comprises mutations of S128A, L153P, K229N, F333N, wherein the positions correspond to SEQ ID NO: 1. In some embodiments, the polypeptide having protease activity comprises an amino acid sequence having at least 50%, at least 60%, at least 70%, at least 80%, at least 81%, at least 82%, at least 83%, at least 84%, at least 85%, at least 86%, at least 87%, at least 88%, at least 89%, at least 90%, at least 91%, at least 92%, at least 93%, at least 94%, at least 95%, at least 96%, at least 97%, at least 98%, or at least 99% sequence identity to SEQ ID NO: 1, provided that the amino acid sequence comprises mutations of S128A, L153P, N162D, F333N, wherein the positions correspond to SEQ ID NO: 1. In some embodiments, the polypeptide having protease activity comprises an amino acid sequence having at least 50%, at least 60%, at least 70%, at least 80%, at least 81%, at least 82%, at least 83%, at least 84%, at least 85%, at least 86%, at least 87%, at least 88%, at least 89%, at least 90%, at least 91%, at least 92%, at least 93%, at least 94%, at least 95%, at least 96%, at least 97%, at least 98%, or at least 99% sequence identity to SEQ ID NO: 1, provided that the amino acid sequence comprises mutations of S128A, L153P, R280D, F333N, wherein the positions correspond to SEQ ID NO: 1. In some embodiments, the polypeptide having protease activity comprises an amino acid sequence having at least 50%, at least 60%, at least 70%, at least 80%, at least 81%, at least 82%, at least 83%, at least 84%, at least 85%, at least 86%, at least 87%, at least 88%, at least 89%, at least 90%, at least 91%, at least 92%, at least 93%, at least 94%, at least 95%, at least 96%, at least 97%, at least 98%, or at least 99% sequence identity to SEQ ID NO: 1, provided that the amino acid sequence comprises mutations of S128A, L153P, R280A, F333N, wherein the positions correspond to SEQ ID NO: 1. In some embodiments, the polypeptide having protease activity comprises an amino acid sequence having at least 50%, at least 60%, at least 70%, at least 80%, at least 81%, at least 82%, at least 83%, at least 84%, at least 85%, at least 86%, at least 87%, at least 88%, at least 89%, at least 90%, at least 91%, at least 92%, at least 93%, at least 94%, at least 95%, at least 96%, at least 97%, at least 98%, or at least 99% sequence identity to SEQ ID NO: 1, provided that the amino acid sequence comprises mutations of S128A, L153P, R280Y, F333N, wherein the positions correspond to SEQ ID NO: 1. In some embodiments, the polypeptide having protease activity comprises an amino acid sequence having at least 50%, at least 60%, at least 70%, at least 80%, at least 81%, at least 82%, at least 83%, at least 84%, at least 85%, at least 86%, at least 87%, at least 88%, at least 89%, at least 90%, at least 91%, at least 92%, at least 93%, at least 94%, at least 95%, at least 96%, at least 97%, at least 98%, or at least 99% sequence identity to SEQ ID NO: 1, provided that the amino acid sequence comprises mutations of S128A, L153P, R280N, F333N, wherein the positions correspond to SEQ ID NO: 1. In some embodiments, the polypeptide having protease activity comprises an amino acid sequence having at least 50%, at least 60%, at least 70%, at least 80%, at least 81%, at least 82%, at least 83%, at least 84%, at least 85%, at least 86%, at least 87%, at least 88%, at least 89%, at least 90%, at least 91%, at least 92%, at least 93%, at least 94%, at least 95%, at least 96%, at least 97%, at least 98%, or at least 99% sequence identity to SEQ ID NO: 1, provided that the amino acid sequence comprises mutations of S128A, L153P, R280T, F333N, wherein the positions correspond to SEQ ID NO: 1. In some embodiments, the polypeptide having protease activity comprises an amino acid sequence having at least 50%, at least 60%, at least 70%, at least 80%, at least 81%, at least 82%, at least 83%, at least 84%, at least 85%, at least 86%, at least 87%, at least 88%, at least 89%, at least 90%, at least 91%, at least 92%, at least 93%, at least 94%, at least 95%, at least 96%, at least 97%, at least 98%, or at least 99% sequence identity to SEQ ID NO: 1, provided that the amino acid sequence comprises mutations of S128A, L153P, K324I, F333N, wherein the positions correspond to SEQ ID NO: 1. In some embodiments, the polypeptide having protease activity comprises an amino acid sequence having at least 50%, at least 60%, at least 70%, at least 80%, at least 81%, at least 82%, at least 83%, at least 84%, at least 85%, at least 86%, at least 87%, at least 88%, at least 89%, at least 90%, at least 91%, at least 92%, at least 93%, at least 94%, at least 95%, at least 96%, at least 97%, at least 98%, or at least 99% sequence identity to SEQ ID NO: 1, provided that the amino acid sequence comprises mutations of S128A, L153P, E310D, F333N, wherein the positions correspond to SEQ ID NO: 1. In some embodiments, the polypeptide having protease activity comprises an amino acid sequence having at least 50%, at least 60%, at least 70%, at least 80%, at least 81%, at least 82%, at least 83%, at least 84%, at least 85%, at least 86%, at least 87%, at least 88%, at least 89%, at least 90%, at least 91%, at least 92%, at least 93%, at least 94%, at least 95%, at least 96%, at least 97%, at least 98%, or at least 99% sequence identity to SEQ ID NO: 1, provided that the amino acid sequence comprises mutations of S128A, L153P, E310N, F333N, wherein the positions correspond to SEQ ID NO: 1. In some embodiments, the polypeptide having protease activity comprises an amino acid sequence having at least 50%, at least 60%, at least 70%, at least 80%, at least 81%, at least 82%, at least 83%, at least 84%, at least 85%, at least 86%, at least 87%, at least 88%, at least 89%, at least 90%, at least 91%, at least 92%, at least 93%, at least 94%, at least 95%, at least 96%, at least 97%, at least 98%, or at least 99% sequence identity to SEQ ID NO: 1, provided that the amino acid sequence comprises mutations of S128A, L153P, E310S, F333N, wherein the positions correspond to SEQ ID NO: 1. In some embodiments, the polypeptide having protease activity comprises an amino acid sequence having at least 50%, at least 60%, at least 70%, at least 80%, at least 81%, at least 82%, at least 83%, at least 84%, at least 85%, at least 86%, at least 87%, at least 88%, at least 89%, at least 90%, at least 91%, at least 92%, at least 93%, at least 94%, at least 95%, at least 96%, at least 97%, at least 98%, or at least 99% sequence identity to SEQ ID NO: 1, provided that the amino acid sequence comprises mutations of S128A, L153P, K318N, F333N, wherein the positions correspond to SEQ ID NO: 1. In some embodiments, the polypeptide having protease activity comprises an amino acid sequence having at least 50%, at least 60%, at least 70%, at least 80%, at least 81%, at least 82%, at least 83%, at least 84%, at least 85%, at least 86%, at least 87%, at least 88%, at least 89%, at least 90%, at least 91%, at least 92%, at least 93%, at least 94%, at least 95%, at least 96%, at least 97%, at least 98%, or at least 99% sequence identity to SEQ ID NO: 1, provided that the amino acid sequence comprises mutations of S128A, L153P, K318E, F333N, wherein the positions correspond to SEQ ID NO: 1. In some embodiments, the polypeptide having protease activity comprises an amino acid sequence having at least 50%, at least 60%, at least 70%, at least 80%, at least 81%, at least 82%, at least 83%, at least 84%, at least 85%, at least 86%, at least 87%, at least 88%, at least 89%, at least 90%, at least 91%, at least 92%, at least 93%, at least 94%, at least 95%, at least 96%, at least 97%, at least 98%, or at least 99% sequence identity to SEQ ID NO: 1, provided that the amino acid sequence comprises mutations of S128A, L153P, K318D, F333N, wherein the positions correspond to SEQ ID NO: 1. In some embodiments, the polypeptide having protease activity comprises an amino acid sequence having at least 50%, at least 60%, at least 70%, at least 80%, at least 81%, at least 82%, at least 83%, at least 84%, at least 85%, at least 86%, at least 87%, at least 88%, at least 89%, at least 90%, at least 91%, at least 92%, at least 93%, at least 94%, at least 95%, at least 96%, at least 97%, at least 98%, or at least 99% sequence identity to SEQ ID NO: 1, provided that the amino acid sequence comprises mutations of S128A, L153P, K318Q, F333N, wherein the positions correspond to SEQ ID NO: 1. In some embodiments, the polypeptide having protease activity comprises an amino acid sequence having at least 50%, at least 60%, at least 70%, at least 80%, at least 81%, at least 82%, at least 83%, at least 84%, at least 85%, at least 86%, at least 87%, at least 88%, at least 89%, at least 90%, at least 91%, at least 92%, at least 93%, at least 94%, at least 95%, at least 96%, at least 97%, at least 98%, or at least 99% sequence identity to SEQ ID NO: 1, provided that the amino acid sequence comprises mutations of S128A, L153P, K318P, F333N, wherein the positions correspond to SEQ ID NO: 1. In some embodiments, the polypeptide having protease activity comprises an amino acid sequence having at least 50%, at least 60%, at least 70%, at least 80%, at least 81%, at least 82%, at least 83%, at least 84%, at least 85%, at least 86%, at least 87%, at least 88%, at least 89%, at least 90%, at least 91%, at least 92%, at least 93%, at least 94%, at least 95%, at least 96%, at least 97%, at least 98%, or at least 99% sequence identity to SEQ ID NO: 1, provided that the amino acid sequence comprises mutations of S128A, L153P, K318F, F333N, wherein the positions correspond to SEQ ID NO: 1. In some embodiments, the polypeptide having protease activity comprises an amino acid sequence having at least 50%, at least 60%, at least 70%, at least 80%, at least 81%, at least 82%, at least 83%, at least 84%, at least 85%, at least 86%, at least 87%, at least 88%, at least 89%, at least 90%, at least 91%, at least 92%, at least 93%, at least 94%, at least 95%, at least 96%, at least 97%, at least 98%, or at least 99% sequence identity to SEQ ID NO: 1, provided that the amino acid sequence comprises mutations of S128A, L153P, K318V, F333N, wherein the positions correspond to SEQ ID NO: 1. In some embodiments, the polypeptide having protease activity comprises an amino acid sequence having at least 50%, at least 60%, at least 70%, at least 80%, at least 81%, at least 82%, at least 83%, at least 84%, at least 85%, at least 86%, at least 87%, at least 88%, at least 89%, at least 90%, at least 91%, at least 92%, at least 93%, at least 94%, at least 95%, at least 96%, at least 97%, at least 98%, or at least 99% sequence identity to SEQ ID NO: 1, provided that the amino acid sequence comprises mutations of S128A, L153P, K318L, F333N, wherein the positions correspond to SEQ ID NO: 1. In some embodiments, the polypeptide having protease activity comprises an amino acid sequence having at least 50%, at least 60%, at least 70%, at least 80%, at least 81%, at least 82%, at least 83%, at least 84%, at least 85%, at least 86%, at least 87%, at least 88%, at least 89%, at least 90%, at least 91%, at least 92%, at least 93%, at least 94%, at least 95%, at least 96%, at least 97%, at least 98%, or at least 99% sequence identity to SEQ ID NO: 1, provided that the amino acid sequence comprises mutations of S128A, L153P, K318S, F333N, wherein the positions correspond to SEQ ID NO: 1. In some embodiments, the polypeptide having protease activity comprises an amino acid sequence having at least 50%, at least 60%, at least 70%, at least 80%, at least 81%, at least 82%, at least 83%, at least 84%, at least 85%, at least 86%, at least 87%, at least 88%, at least 89%, at least 90%, at least 91%, at least 92%, at least 93%, at least 94%, at least 95%, at least 96%, at least 97%, at least 98%, or at least 99% sequence identity to SEQ ID NO: 1, provided that the amino acid sequence comprises mutations of S128A, L153P, K318I, F333N, wherein the positions correspond to SEQ ID NO: 1. In some embodiments, the polypeptide having protease activity comprises an amino acid sequence having at least 50%, at least 60%, at least 70%, at least 80%, at least 81%, at least 82%, at least 83%, at least 84%, at least 85%, at least 86%, at least 87%, at least 88%, at least 89%, at least 90%, at least 91%, at least 92%, at least 93%, at least 94%, at least 95%, at least 96%, at least 97%, at least 98%, or at least 99% sequence identity to SEQ ID NO: 1, provided that the amino acid sequence comprises mutations of S128A, L153P, K201E, F333N, wherein the positions correspond to SEQ ID NO: 1. In some embodiments, the polypeptide having protease activity comprises an amino acid sequence having at least 50%, at least 60%, at least 70%, at least 80%, at least 81%, at least 82%, at least 83%, at least 84%, at least 85%, at least 86%, at least 87%, at least 88%, at least 89%, at least 90%, at least 91%, at least 92%, at least 93%, at least 94%, at least 95%, at least 96%, at least 97%, at least 98%, or at least 99% sequence identity to SEQ ID NO: 1, provided that the amino acid sequence comprises mutations of S128A, L153P, K201S, F333N, wherein the positions correspond to SEQ ID NO: 1. In some embodiments, the polypeptide having protease activity comprises an amino acid sequence having at least 50%, at least 60%, at least 70%, at least 80%, at least 81%, at least 82%, at least 83%, at least 84%, at least 85%, at least 86%, at least 87%, at least 88%, at least 89%, at least 90%, at least 91%, at least 92%, at least 93%, at least 94%, at least 95%, at least 96%, at least 97%, at least 98%, or at least 99% sequence identity to SEQ ID NO: 1, provided that the amino acid sequence comprises mutations of S128A, L153P, H197S, F333N, wherein the positions correspond to SEQ ID NO: 1. In some embodiments, the polypeptide having protease activity comprises an amino acid sequence having at least 50%, at least 60%, at least 70%, at least 80%, at least 81%, at least 82%, at least 83%, at least 84%, at least 85%, at least 86%, at least 87%, at least 88%, at least 89%, at least 90%, at least 91%, at least 92%, at least 93%, at least 94%, at least 95%, at least 96%, at least 97%, at least 98%, or at least 99% sequence identity to SEQ ID NO: 1, provided that the amino acid sequence comprises mutations of S128A, L153P, K160E, F333N, wherein the positions correspond to SEQ ID NO: 1. In some embodiments, the polypeptide having protease activity comprises an amino acid sequence having at least 50%, at least 60%, at least 70%, at least 80%, at least 81%, at least 82%, at least 83%, at least 84%, at least 85%, at least 86%, at least 87%, at least 88%, at least 89%, at least 90%, at least 91%, at least 92%, at least 93%, at least 94%, at least 95%, at least 96%, at least 97%, at least 98%, or at least 99% sequence identity to SEQ ID NO: 1, provided that the amino acid sequence comprises mutations of S128A, L153P, K165E, F333N, wherein the positions correspond to SEQ ID NO: 1. In some embodiments, the polypeptide having protease activity comprises an amino acid sequence having at least 50%, at least 60%, at least 70%, at least 80%, at least 81%, at least 82%, at least 83%, at least 84%, at least 85%, at least 86%, at least 87%, at least 88%, at least 89%, at least 90%, at least 91%, at least 92%, at least 93%, at least 94%, at least 95%, at least 96%, at least 97%, at least 98%, or at least 99% sequence identity to SEQ ID NO: 1, provided that the amino acid sequence comprises mutations of S128A, L153P, R309G, F333N, wherein the positions correspond to SEQ ID NO: 1. In some embodiments, the polypeptide having protease activity comprises an amino acid sequence having at least 50%, at least 60%, at least 70%, at least 80%, at least 81%, at least 82%, at least 83%, at least 84%, at least 85%, at least 86%, at least 87%, at least 88%, at least 89%, at least 90%, at least 91%, at least 92%, at least 93%, at least 94%, at least 95%, at least 96%, at least 97%, at least 98%, or at least 99% sequence identity to SEQ ID NO: 1, provided that the amino acid sequence comprises mutations of S128A, L153P, R319E, F333N, wherein the positions correspond to SEQ ID NO: 1. In some embodiments, the polypeptide having protease activity comprises an amino acid sequence having at least 50%, at least 60%, at least 70%, at least 80%, at least 81%, at least 82%, at least 83%, at least 84%, at least 85%, at least 86%, at least 87%, at least 88%, at least 89%, at least 90%, at least 91%, at least 92%, at least 93%, at least 94%, at least 95%, at least 96%, at least 97%, at least 98%, or at least 99% sequence identity to SEQ ID NO: 1, provided that the amino acid sequence comprises mutations of S128A, L153P, R319T, F333N, wherein the positions correspond to SEQ ID NO: 1. In some embodiments, the polypeptide having protease activity comprises an amino acid sequence having at least 50%, at least 60%, at least 70%, at least 80%, at least 81%, at least 82%, at least 83%, at least 84%, at least 85%, at least 86%, at least 87%, at least 88%, at least 89%, at least 90%, at least 91%, at least 92%, at least 93%, at least 94%, at least 95%, at least 96%, at least 97%, at least 98%, or at least 99% sequence identity to SEQ ID NO: 1, provided that the amino acid sequence comprises mutations of S128A, L153P, R320Q, F333N, wherein the positions correspond to SEQ ID NO: 1. In some embodiments, the polypeptide having protease activity comprises an amino acid sequence having at least 50%, at least 60%, at least 70%, at least 80%, at least 81%, at least 82%, at least 83%, at least 84%, at least 85%, at least 86%, at least 87%, at least 88%, at least 89%, at least 90%, at least 91%, at least 92%, at least 93%, at least 94%, at least 95%, at least 96%, at least 97%, at least 98%, or at least 99% sequence identity to SEQ ID NO: 1, provided that the amino acid sequence comprises mutations of S128A, L153P, R320L, F333N, wherein the positions correspond to SEQ ID NO: 1. In some embodiments, the polypeptide having protease activity comprises an amino acid sequence having at least 50%, at least 60%, at least 70%, at least 80%, at least 81%, at least 82%, at least 83%, at least 84%, at least 85%, at least 86%, at least 87%, at least 88%, at least 89%, at least 90%, at least 91%, at least 92%, at least 93%, at least 94%, at least 95%, at least 96%, at least 97%, at least 98%, or at least 99% sequence identity to SEQ ID NO: 1, provided that the amino acid sequence comprises mutations of A79V, S128A, L153P, R189K, H222Q, F333N, wherein the positions correspond to SEQ ID NO: 1. In some embodiments, the polypeptide having protease activity comprises an amino acid sequence having at least 50%, at least 60%, at least 70%, at least 80%, at least 81%, at least 82%, at least 83%, at least 84%, at least 85%, at least 86%, at least 87%, at least 88%, at least 89%, at least 90%, at least 91%, at least 92%, at least 93%, at least 94%, at least 95%, at least 96%, at least 97%, at least 98%, or at least 99% sequence identity to SEQ ID NO: 1, provided that the amino acid sequence comprises mutations of D71E, A79V, S128A, L153P, H222Q, F333N, wherein the positions correspond to SEQ ID NO: 1. In some embodiments, the polypeptide having protease activity comprises an amino acid sequence having at least 50%, at least 60%, at least 70%, at least 80%, at least 81%, at least 82%, at least 83%, at least 84%, at least 85%, at least 86%, at least 87%, at least 88%, at least 89%, at least 90%, at least 91%, at least 92%, at least 93%, at least 94%, at least 95%, at least 96%, at least 97%, at least 98%, or at least 99% sequence identity to SEQ ID NO: 1, provided that the amino acid sequence comprises mutations of D71E, A79V, S128A, L153P, R189K, F333N, wherein the positions correspond to SEQ ID NO: 1. In some embodiments, the polypeptide having protease activity comprises an amino acid sequence having at least 50%, at least 60%, at least 70%, at least 80%, at least 81%, at least 82%, at least 83%, at least 84%, at least 85%, at least 86%, at least 87%, at least 88%, at least 89%, at least 90%, at least 91%, at least 92%, at least 93%, at least 94%, at least 95%, at least 96%, at least 97%, at least 98%, or at least 99% sequence identity to SEQ ID NO: 1, provided that the amino acid sequence comprises mutations of D71E, S128A, L153P, R189K, H222Q, F333N, wherein the positions correspond to SEQ ID NO: 1. In some embodiments, the polypeptide having protease activity comprises an amino acid sequence having at least 50%, at least 60%, at least 70%, at least 80%, at least 81%, at least 82%, at least 83%, at least 84%, at least 85%, at least 86%, at least 87%, at least 88%, at least 89%, at least 90%, at least 91%, at least 92%, at least 93%, at least 94%, at least 95%, at least 96%, at least 97%, at least 98%, or at least 99% sequence identity to SEQ ID NO: 1, provided that the amino acid sequence comprises mutations of S128A, L153P, K324I, F333N, N162E, K229E, wherein the positions correspond to SEQ ID NO: 1. In some embodiments, the polypeptide having protease activity comprises an amino acid sequence having at least 50%, at least 60%, at least 70%, at least 80%, at least 81%, at least 82%, at least 83%, at least 84%, at least 85%, at least 86%, at least 87%, at least 88%, at least 89%, at least 90%, at least 91%, at least 92%, at least 93%, at least 94%, at least 95%, at least 96%, at least 97%, at least 98%, or at least 99% sequence identity to SEQ ID NO: 1, provided that the amino acid sequence comprises mutations of S128A, L153P, K324I, F333N, N162E, K229E, K196D, wherein the positions correspond to SEQ ID NO: 1. In some embodiments, the polypeptide having protease activity comprises an amino acid sequence having at least 50%, at least 60%, at least 70%, at least 80%, at least 81%, at least 82%, at least 83%, at least 84%, at least 85%, at least 86%, at least 87%, at least 88%, at least 89%, at least 90%, at least 91%, at least 92%, at least 93%, at least 94%, at least 95%, at least 96%, at least 97%, at least 98%, or at least 99% sequence identity to SEQ ID NO: 1, provided that the amino acid sequence comprises mutations of S128A, L153P, K324I, F333N, N162E, K229E, R280T, wherein the positions correspond to SEQ ID NO: 1. In some embodiments, the polypeptide having protease activity comprises an amino acid sequence having at least 50%, at least 60%, at least 70%, at least 80%, at least 81%, at least 82%, at least 83%, at least 84%, at least 85%, at least 86%, at least 87%, at least 88%, at least 89%, at least 90%, at least 91%, at least 92%, at least 93%, at least 94%, at least 95%, at least 96%, at least 97%, at least 98%, or at least 99% sequence identity to SEQ ID NO: 1, provided that the amino acid sequence comprises mutations of S128A, L153P, K324I, F333N, N162E, K229E, R280T, K196D, wherein the positions correspond to SEQ ID NO: 1. In some embodiments, the polypeptide having protease activity comprises an amino acid sequence having at least 50%, at least 60%, at least 70%, at least 80%, at least 81%, at least 82%, at least 83%, at least 84%, at least 85%, at least 86%, at least 87%, at least 88%, at least 89%, at least 90%, at least 91%, at least 92%, at least 93%, at least 94%, at least 95%, at least 96%, at least 97%, at least 98%, or at least 99% sequence identity to SEQ ID NO: 1, provided that the amino acid sequence comprises mutations of S128A, L153P, K324I, F333N, K196D, wherein the positions correspond to SEQ ID NO: 1. In some embodiments, the polypeptide having protease activity comprises an amino acid sequence having at least 50%, at least 60%, at least 70%, at least 80%, at least 81%, at least 82%, at least 83%, at least 84%, at least 85%, at least 86%, at least 87%, at least 88%, at least 89%, at least 90%, at least 91%, at least 92%, at least 93%, at least 94%, at least 95%, at least 96%, at least 97%, at least 98%, or at least 99% sequence identity to SEQ ID NO: 1, provided that the amino acid sequence comprises mutations of S128A, L153P, K324I, F333N, R280T, wherein the positions correspond to SEQ ID NO: 1. In some embodiments, the polypeptide having protease activity comprises an amino acid sequence having at least 50%, at least 60%, at least 70%, at least 80%, at least 81%, at least 82%, at least 83%, at least 84%, at least 85%, at least 86%, at least 87%, at least 88%, at least 89%, at least 90%, at least 91%, at least 92%, at least 93%, at least 94%, at least 95%, at least 96%, at least 97%, at least 98%, or at least 99% sequence identity to SEQ ID NO: 1, provided that the amino acid sequence comprises mutations of S128A, L153P, K324I, F333N, R280T, K196D, wherein the positions correspond to SEQ ID NO: 1. In some embodiments, the polypeptide having protease activity comprises an amino acid sequence having at least 50%, at least 60%, at least 70%, at least 80%, at least 81%, at least 82%, at least 83%, at least 84%, at least 85%, at least 86%, at least 87%, at least 88%, at least 89%, at least 90%, at least 91%, at least 92%, at least 93%, at least 94%, at least 95%, at least 96%, at least 97%, at least 98%, or at least 99% sequence identity to SEQ ID NO: 1, provided that the amino acid sequence comprises mutations of S128A, L153P, K324I, F333N, N162E, K229E, K196S, wherein the positions correspond to SEQ ID NO: 1. In some embodiments, the polypeptide having protease activity comprises an amino acid sequence having at least 50%, at least 60%, at least 70%, at least 80%, at least 81%, at least 82%, at least 83%, at least 84%, at least 85%, at least 86%, at least 87%, at least 88%, at least 89%, at least 90%, at least 91%, at least 92%, at least 93%, at least 94%, at least 95%, at least 96%, at least 97%, at least 98%, or at least 99% sequence identity to SEQ ID NO: 1, provided that the amino acid sequence comprises mutations of S128A, L153P, K324I, F333N, N162E, K229E, R280T, K196S, wherein the positions correspond to SEQ ID NO: 1. In some embodiments, the polypeptide having protease activity comprises an amino acid sequence having at least 50%, at least 60%, at least 70%, at least 80%, at least 81%, at least 82%, at least 83%, at least 84%, at least 85%, at least 86%, at least 87%, at least 88%, at least 89%, at least 90%, at least 91%, at least 92%, at least 93%, at least 94%, at least 95%, at least 96%, at least 97%, at least 98%, or at least 99% sequence identity to SEQ ID NO: 1, provided that the amino acid sequence comprises mutations of S128A, L153P, K324I, F333N, N162E, K229E, R280T, H222Q, wherein the positions correspond to SEQ ID NO: 1. In some embodiments, the polypeptide having protease activity comprises an amino acid sequence having at least 50%, at least 60%, at least 70%, at least 80%, at least 81%, at least 82%, at least 83%, at least 84%, at least 85%, at least 86%, at least 87%, at least 88%, at least 89%, at least 90%, at least 91%, at least 92%, at least 93%, at least 94%, at least 95%, at least 96%, at least 97%, at least 98%, or at least 99% sequence identity to SEQ ID NO: 1, provided that the amino acid sequence comprises mutations of S128A, L153P, K324I, F333N, N162E, K229E, R280T, H222Q, K196D, wherein the positions correspond to SEQ ID NO: 1. In some embodiments, the polypeptide having protease activity comprises an amino acid sequence having at least 50%, at least 60%, at least 70%, at least 80%, at least 81%, at least 82%, at least 83%, at least 84%, at least 85%, at least 86%, at least 87%, at least 88%, at least 89%, at least 90%, at least 91%, at least 92%, at least 93%, at least 94%, at least 95%, at least 96%, at least 97%, at least 98%, or at least 99% sequence identity to SEQ ID NO: 1, provided that the amino acid sequence comprises mutations of S128A, L153P, K324I, F333N, N162E, K229E, R280T, H222Q, K196S, wherein the positions correspond to SEQ ID NO: 1. In some embodiments, the polypeptide having protease activity comprises an amino acid sequence having at least 50%, at least 60%, at least 70%, at least 80%, at least 81%, at least 82%, at least 83%, at least 84%, at least 85%, at least 86%, at least 87%, at least 88%, at least 89%, at least 90%, at least 91%, at least 92%, at least 93%, at least 94%, at least 95%, at least 96%, at least 97%, at least 98%, or at least 99% sequence identity to SEQ ID NO: 1, provided that the amino acid sequence comprises mutations of S128A, L153P, K324I, F333N, K318S, wherein the positions correspond to SEQ ID NO: 1. In some embodiments, the polypeptide having protease activity comprises an amino acid sequence having at least 50%, at least 60%, at least 70%, at least 80%, at least 81%, at least 82%, at least 83%, at least 84%, at least 85%, at least 86%, at least 87%, at least 88%, at least 89%, at least 90%, at least 91%, at least 92%, at least 93%, at least 94%, at least 95%, at least 96%, at least 97%, at least 98%, or at least 99% sequence identity to SEQ ID NO: 1, provided that the amino acid sequence comprises mutations of S128A, L153P, K324I, F333N, N162E, K229E, K318S, wherein the positions correspond to SEQ ID NO: 1. In some embodiments, the polypeptide having protease activity comprises an amino acid sequence having at least 50%, at least 60%, at least 70%, at least 80%, at least 81%, at least 82%, at least 83%, at least 84%, at least 85%, at least 86%, at least 87%, at least 88%, at least 89%, at least 90%, at least 91%, at least 92%, at least 93%, at least 94%, at least 95%, at least 96%, at least 97%, at least 98%, or at least 99% sequence identity to SEQ ID NO: 1, provided that the amino acid sequence comprises mutations of S128A, L153P, K324I, F333N, N162E, K229E, R280T, K318S, wherein the positions correspond to SEQ ID NO: 1. In some embodiments, the polypeptide having protease activity comprises an amino acid sequence having at least 50%, at least 60%, at least 70%, at least 80%, at least 81%, at least 82%, at least 83%, at least 84%, at least 85%, at least 86%, at least 87%, at least 88%, at least 89%, at least 90%, at least 91%, at least 92%, at least 93%, at least 94%, at least 95%, at least 96%, at least 97%, at least 98%, or at least 99% sequence identity to SEQ ID NO: 1, provided that the amino acid sequence comprises mutations of S128A, L153P, K324I, F333N, R320W, wherein the positions correspond to SEQ ID NO: 1. In some embodiments, the polypeptide having protease activity comprises an amino acid sequence having at least 50%, at least 60%, at least 70%, at least 80%, at least 81%, at least 82%, at least 83%, at least 84%, at least 85%, at least 86%, at least 87%, at least 88%, at least 89%, at least 90%, at least 91%, at least 92%, at least 93%, at least 94%, at least 95%, at least 96%, at least 97%, at least 98%, or at least 99% sequence identity to SEQ ID NO: 1, provided that the amino acid sequence comprises mutations of S128A, L153P, K324I, F333N, N162E, K229E, R320W, wherein the positions correspond to SEQ ID NO: 1. In some embodiments, the polypeptide having protease activity comprises an amino acid sequence having at least 50%, at least 60%, at least 70%, at least 80%, at least 81%, at least 82%, at least 83%, at least 84%, at least 85%, at least 86%, at least 87%, at least 88%, at least 89%, at least 90%, at least 91%, at least 92%, at least 93%, at least 94%, at least 95%, at least 96%, at least 97%, at least 98%, or at least 99% sequence identity to SEQ ID NO: 1, provided that the amino acid sequence comprises mutations of S128A, L153P, K324I, F333N, N162E, K229E, R280T, R320W, wherein the positions correspond to SEQ ID NO: 1. In some embodiments, the polypeptide having protease activity comprises an amino acid sequence having at least 50%, at least 60%, at least 70%, at least 80%, at least 81%, at least 82%, at least 83%, at least 84%, at least 85%, at least 86%, at least 87%, at least 88%, at least 89%, at least 90%, at least 91%, at least 92%, at least 93%, at least 94%, at least 95%, at least 96%, at least 97%, at least 98%, or at least 99% sequence identity to SEQ ID NO: 1, provided that the amino acid sequence comprises mutations of S128A, L153P, K324I, F333N, T122S, wherein the positions correspond to SEQ ID NO: 1. In some embodiments, the polypeptide having protease activity comprises an amino acid sequence having at least 50%, at least 60%, at least 70%, at least 80%, at least 81%, at least 82%, at least 83%, at least 84%, at least 85%, at least 86%, at least 87%, at least 88%, at least 89%, at least 90%, at least 91%, at least 92%, at least 93%, at least 94%, at least 95%, at least 96%, at least 97%, at least 98%, or at least 99% sequence identity to SEQ ID NO: 1, provided that the amino acid sequence comprises mutations of S128A, L153P, K324I, F333N, N162E, K229E, T122S, wherein the positions correspond to SEQ ID NO: 1. In some embodiments, the polypeptide having protease activity comprises an amino acid sequence having at least 50%, at least 60%, at least 70%, at least 80%, at least 81%, at least 82%, at least 83%, at least 84%, at least 85%, at least 86%, at least 87%, at least 88%, at least 89%, at least 90%, at least 91%, at least 92%, at least 93%, at least 94%, at least 95%, at least 96%, at least 97%, at least 98%, or at least 99% sequence identity to SEQ ID NO: 1, provided that the amino acid sequence comprises mutations of S128A, L153P, K324I, F333N, N162E, K229E, R280T, T122S, wherein the positions correspond to SEQ ID NO: 1. In some embodiments, the polypeptide having protease activity comprises an amino acid sequence having at least 50%, at least 60%, at least 70%, at least 80%, at least 81%, at least 82%, at least 83%, at least 84%, at least 85%, at least 86%, at least 87%, at least 88%, at least 89%, at least 90%, at least 91%, at least 92%, at least 93%, at least 94%, at least 95%, at least 96%, at least 97%, at least 98%, or at least 99% sequence identity to SEQ ID NO: 1, provided that the amino acid sequence comprises mutations of S128A, L153P, K324I, F333N, D71Q, K68W, E75Y, D88H, wherein the positions correspond to SEQ ID NO: 1. In some embodiments, the polypeptide having protease activity comprises an amino acid sequence having at least 50%, at least 60%, at least 70%, at least 80%, at least 81%, at least 82%, at least 83%, at least 84%, at least 85%, at least 86%, at least 87%, at least 88%, at least 89%, at least 90%, at least 91%, at least 92%, at least 93%, at least 94%, at least 95%, at least 96%, at least 97%, at least 98%, or at least 99% sequence identity to SEQ ID NO: 1, provided that the amino acid sequence comprises mutations of S128A, L153P, K324I, F333N, N162E, K229E, D71Q, K68W, E75Y, D88H, wherein the positions correspond to SEQ ID NO: 1. In some embodiments, the polypeptide having protease activity comprises an amino acid sequence having at least 50%, at least 60%, at least 70%, at least 80%, at least 81%, at least 82%, at least 83%, at least 84%, at least 85%, at least 86%, at least 87%, at least 88%, at least 89%, at least 90%, at least 91%, at least 92%, at least 93%, at least 94%, at least 95%, at least 96%, at least 97%, at least 98%, or at least 99% sequence identity to SEQ ID NO: 1, provided that the amino acid sequence comprises mutations of S128A, L153P, K324I, F333N, N162E, K229E, R280T, D71Q, K68W, E75Y, D88H, wherein the positions correspond to SEQ ID NO: 1. In some embodiments, the polypeptide having protease activity comprises an amino acid sequence having at least 50%, at least 60%, at least 70%, at least 80%, at least 81%, at least 82%, at least 83%, at least 84%, at least 85%, at least 86%, at least 87%, at least 88%, at least 89%, at least 90%, at least 91%, at least 92%, at least 93%, at least 94%, at least 95%, at least 96%, at least 97%, at least 98%, or at least 99% sequence identity to SEQ ID NO: 1, provided that the amino acid sequence comprises mutations of S128A, L153P, K324I, F333N, N162E, K229E, R280T, K196D, D71Q, K68W, E75Y, D88H, wherein the positions correspond to SEQ ID NO: 1. In some embodiments, the polypeptide having protease activity comprises an amino acid sequence having at least 50%, at least 60%, at least 70%, at least 80%, at least 81%, at least 82%, at least 83%, at least 84%, at least 85%, at least 86%, at least 87%, at least 88%, at least 89%, at least 90%, at least 91%, at least 92%, at least 93%, at least 94%, at least 95%, at least 96%, at least 97%, at least 98%, or at least 99% sequence identity to SEQ ID NO: 1, provided that the amino acid sequence comprises mutations of S128A, L153P, K324I, F333N, K318S, R320W, T122S, D71Q, K68W, E75Y, D88H, wherein the positions correspond to SEQ ID NO: 1. In some embodiments, the polypeptide having protease activity comprises an amino acid sequence having at least 50%, at least 60%, at least 70%, at least 80%, at least 81%, at least 82%, at least 83%, at least 84%, at least 85%, at least 86%, at least 87%, at least 88%, at least 89%, at least 90%, at least 91%, at least 92%, at least 93%, at least 94%, at least 95%, at least 96%, at least 97%, at least 98%, or at least 99% sequence identity to SEQ ID NO: 1, provided that the amino acid sequence comprises mutations of S128A, L153P, K324I, F333N, N162E, K229E, K318S, R320W, T122S, D71Q, K68W, E75Y, D88H, wherein the positions correspond to SEQ ID NO: 1. In some embodiments, the polypeptide having protease activity comprises an amino acid sequence having at least 50%, at least 60%, at least 70%, at least 80%, at least 81%, at least 82%, at least 83%, at least 84%, at least 85%, at least 86%, at least 87%, at least 88%, at least 89%, at least 90%, at least 91%, at least 92%, at least 93%, at least 94%, at least 95%, at least 96%, at least 97%, at least 98%, or at least 99% sequence identity to SEQ ID NO: 1, provided that the amino acid sequence comprises mutations of S128A, L153P, K324I, F333N, N162E, K229E, R280T, K318S, R320W, T122S, D71Q, K68W, E75Y, D88H, wherein the positions correspond to SEQ ID NO: 1. In some embodiments, the polypeptide having protease activity comprises an amino acid sequence having at least 50%, at least 60%, at least 70%, at least 80%, at least 81%, at least 82%, at least 83%, at least 84%, at least 85%, at least 86%, at least 87%, at least 88%, at least 89%, at least 90%, at least 91%, at least 92%, at least 93%, at least 94%, at least 95%, at least 96%, at least 97%, at least 98%, or at least 99% sequence identity to SEQ ID NO: 1, provided that the amino acid sequence comprises mutations of S128A, L153P, K324I, F333N, N162E, K229E, R280T, K196D, K318S, R320W, T122S, D71Q, K68W, E75Y, D88H, wherein the positions correspond to SEQ ID NO: 1. In some embodiments, the polypeptide having protease activity comprises an amino acid sequence having at least 50%, at least 60%, at least 70%, at least 80%, at least 81%, at least 82%, at least 83%, at least 84%, at least 85%, at least 86%, at least 87%, at least 88%, at least 89%, at least 90%, at least 91%, at least 92%, at least 93%, at least 94%, at least 95%, at least 96%, at least 97%, at least 98%, or at least 99% sequence identity to SEQ ID NO: 1, provided that the amino acid sequence comprises mutations of S128A, L153P, K324I, F333N, H275Y, wherein the positions correspond to SEQ ID NO: 1. In some embodiments, the polypeptide having protease activity comprises an amino acid sequence having at least 50%, at least 60%, at least 70%, at least 80%, at least 81%, at least 82%, at least 83%, at least 84%, at least 85%, at least 86%, at least 87%, at least 88%, at least 89%, at least 90%, at least 91%, at least 92%, at least 93%, at least 94%, at least 95%, at least 96%, at least 97%, at least 98%, or at least 99% sequence identity to SEQ ID NO: 1, provided that the amino acid sequence comprises mutations of S128A, L153P, K324I, F333N, N162E, K229E, H275Y, wherein the positions correspond to SEQ ID NO: 1. In some embodiments, the polypeptide having protease activity comprises an amino acid sequence having at least 50%, at least 60%, at least 70%, at least 80%, at least 81%, at least 82%, at least 83%, at least 84%, at least 85%, at least 86%, at least 87%, at least 88%, at least 89%, at least 90%, at least 91%, at least 92%, at least 93%, at least 94%, at least 95%, at least 96%, at least 97%, at least 98%, or at least 99% sequence identity to SEQ ID NO: 1, provided that the amino acid sequence comprises mutations of S128A, L153P, K324I, F333N, N162E, K229E, R280T, H275Y, wherein the positions correspond to SEQ ID NO: 1. In some embodiments, the polypeptide having protease activity comprises an amino acid sequence having at least 50%, at least 60%, at least 70%, at least 80%, at least 81%, at least 82%, at least 83%, at least 84%, at least 85%, at least 86%, at least 87%, at least 88%, at least 89%, at least 90%, at least 91%, at least 92%, at least 93%, at least 94%, at least 95%, at least 96%, at least 97%, at least 98%, or at least 99% sequence identity to SEQ ID NO: 1, provided that the amino acid sequence comprises mutations of S128A, L153P, K324I, F333N, N162E, K229E, R280T, H222Q, K196S, K318S, wherein the positions correspond to SEQ ID NO: 1. In some embodiments, the polypeptide having protease activity comprises an amino acid sequence having at least 50%, at least 60%, at least 70%, at least 80%, at least 81%, at least 82%, at least 83%, at least 84%, at least 85%, at least 86%, at least 87%, at least 88%, at least 89%, at least 90%, at least 91%, at least 92%, at least 93%, at least 94%, at least 95%, at least 96%, at least 97%, at least 98%, or at least 99% sequence identity to SEQ ID NO: 1, provided that the amino acid sequence comprises mutations of S128A, L153P, K324I, F333N, N162E, K229E, R280T, H222Q, K196S, R320W, wherein the positions correspond to SEQ ID NO: 1. In some embodiments, the polypeptide having protease activity comprises an amino acid sequence having at least 50%, at least 60%, at least 70%, at least 80%, at least 81%, at least 82%, at least 83%, at least 84%, at least 85%, at least 86%, at least 87%, at least 88%, at least 89%, at least 90%, at least 91%, at least 92%, at least 93%, at least 94%, at least 95%, at least 96%, at least 97%, at least 98%, or at least 99% sequence identity to SEQ ID NO: 1, provided that the amino acid sequence comprises mutations of S128A, L153P, K324I, F333N, N162E, K229E, R280T, H222Q, K196S, T122S, wherein the positions correspond to SEQ ID NO: 1. In some embodiments, the polypeptide having protease activity comprises an amino acid sequence having at least 50%, at least 60%, at least 70%, at least 80%, at least 81%, at least 82%, at least 83%, at least 84%, at least 85%, at least 86%, at least 87%, at least 88%, at least 89%, at least 90%, at least 91%, at least 92%, at least 93%, at least 94%, at least 95%, at least 96%, at least 97%, at least 98%, or at least 99% sequence identity to SEQ ID NO: 1, provided that the amino acid sequence comprises mutations of S128A, L153P, K324I, F333N, N162E, K229E, R280T, H222Q, K196S, H275Y, wherein the positions correspond to SEQ ID NO: 1. In some embodiments, the polypeptide having protease activity comprises an amino acid sequence having at least 50%, at least 60%, at least 70%, at least 80%, at least 81%, at least 82%, at least 83%, at least 84%, at least 85%, at least 86%, at least 87%, at least 88%, at least 89%, at least 90%, at least 91%, at least 92%, at least 93%, at least 94%, at least 95%, at least 96%, at least 97%, at least 98%, or at least 99% sequence identity to SEQ ID NO: 1, provided that the amino acid sequence comprises mutations of S128A, L153P, K324I, F333N, N162E, K229E, R280T, H222Q, K196S, D71Q, K68W, E75Y, D88H, wherein the positions correspond to SEQ ID NO: 1. In some embodiments, the polypeptide having protease activity comprises an amino acid sequence having at least 50%, at least 60%, at least 70%, at least 80%, at least 81%, at least 82%, at least 83%, at least 84%, at least 85%, at least 86%, at least 87%, at least 88%, at least 89%, at least 90%, at least 91%, at least 92%, at least 93%, at least 94%, at least 95%, at least 96%, at least 97%, at least 98%, or at least 99% sequence identity to SEQ ID NO: 1, provided that the amino acid sequence comprises mutations of S128A, L153P, K324I, F333N, N162E, K229E, R280T, H222Q, K196S, K318S, R320W, T122S, D71Q, K68W, E75Y, D88H, wherein the positions correspond to SEQ ID NO: 1. In some embodiments, the polypeptide having protease activity comprises an amino acid sequence having at least 50%, at least 60%, at least 70%, at least 80%, at least 81%, at least 82%, at least 83%, at least 84%, at least 85%, at least 86%, at least 87%, at least 88%, at least 89%, at least 90%, at least 91%, at least 92%, at least 93%, at least 94%, at least 95%, at least 96%, at least 97%, at least 98%, or at least 99% sequence identity to SEQ ID NO: 1, provided that the amino acid sequence comprises mutations of S128A, L153P, K324I, F333N, D71Q, wherein the positions correspond to SEQ ID NO: 1. In some embodiments, the polypeptide having protease activity comprises an amino acid sequence having at least 50%, at least 60%, at least 70%, at least 80%, at least 81%, at least 82%, at least 83%, at least 84%, at least 85%, at least 86%, at least 87%, at least 88%, at least 89%, at least 90%, at least 91%, at least 92%, at least 93%, at least 94%, at least 95%, at least 96%, at least 97%, at least 98%, or at least 99% sequence identity to SEQ ID NO: 1, provided that the amino acid sequence comprises mutations of S128A, L153P, K324I, F333N, D112Q, wherein the positions correspond to SEQ ID NO: 1. In some embodiments, the polypeptide having protease activity comprises an amino acid sequence having at least 50%, at least 60%, at least 70%, at least 80%, at least 81%, at least 82%, at least 83%, at least 84%, at least 85%, at least 86%, at least 87%, at least 88%, at least 89%, at least 90%, at least 91%, at least 92%, at least 93%, at least 94%, at least 95%, at least 96%, at least 97%, at least 98%, or at least 99% sequence identity to SEQ ID NO: 1, provided that the amino acid sequence comprises mutations of S128A, L153P, K324I, F333N, D327Y, wherein the positions correspond to SEQ ID NO: 1. In some embodiments, the polypeptide having protease activity comprises an amino acid sequence having at least 50%, at least 60%, at least 70%, at least 80%, at least 81%, at least 82%, at least 83%, at least 84%, at least 85%, at least 86%, at least 87%, at least 88%, at least 89%, at least 90%, at least 91%, at least 92%, at least 93%, at least 94%, at least 95%, at least 96%, at least 97%, at least 98%, or at least 99% sequence identity to SEQ ID NO: 1, provided that the amino acid sequence comprises mutations of S128A, L153P, K324I, F333N, K68W, wherein the positions correspond to SEQ ID NO: 1. In some embodiments, the polypeptide having protease activity comprises an amino acid sequence having at least 50%, at least 60%, at least 70%, at least 80%, at least 81%, at least 82%, at least 83%, at least 84%, at least 85%, at least 86%, at least 87%, at least 88%, at least 89%, at least 90%, at least 91%, at least 92%, at least 93%, at least 94%, at least 95%, at least 96%, at least 97%, at least 98%, or at least 99% sequence identity to SEQ ID NO: 1, provided that the amino acid sequence comprises mutations of S128A, L153P, K324I, F333N, E75Y, wherein the positions correspond to SEQ ID NO: 1. In some embodiments, the polypeptide having protease activity comprises an amino acid sequence having at least 50%, at least 60%, at least 70%, at least 80%, at least 81%, at least 82%, at least 83%, at least 84%, at least 85%, at least 86%, at least 87%, at least 88%, at least 89%, at least 90%, at least 91%, at least 92%, at least 93%, at least 94%, at least 95%, at least 96%, at least 97%, at least 98%, or at least 99% sequence identity to SEQ ID NO: 1, provided that the amino acid sequence comprises mutations of S128A, L153P, K324I, F333N, D88H, wherein the positions correspond to SEQ ID NO: 1. In some embodiments, the polypeptide having protease activity comprises an amino acid sequence having at least 50%, at least 60%, at least 70%, at least 80%, at least 81%, at least 82%, at least 83%, at least 84%, at least 85%, at least 86%, at least 87%, at least 88%, at least 89%, at least 90%, at least 91%, at least 92%, at least 93%, at least 94%, at least 95%, at least 96%, at least 97%, at least 98%, or at least 99% sequence identity to SEQ ID NO: 1, provided that the amino acid sequence comprises mutations of S128A, L153P, K324I, F333N, N219Q, wherein the positions correspond to SEQ ID NO: 1. In some embodiments, the polypeptide having protease activity comprises an amino acid sequence having at least 50%, at least 60%, at least 70%, at least 80%, at least 81%, at least 82%, at least 83%, at least 84%, at least 85%, at least 86%, at least 87%, at least 88%, at least 89%, at least 90%, at least 91%, at least 92%, at least 93%, at least 94%, at least 95%, at least 96%, at least 97%, at least 98%, or at least 99% sequence identity to SEQ ID NO: 1, provided that the amino acid sequence comprises mutations of S128A, L153P, K324I, F333N, S221N, wherein the positions correspond to SEQ ID NO: 1. In some embodiments, the polypeptide having protease activity comprises an amino acid sequence having at least 50%, at least 60%, at least 70%, at least 80%, at least 81%, at least 82%, at least 83%, at least 84%, at least 85%, at least 86%, at least 87%, at least 88%, at least 89%, at least 90%, at least 91%, at least 92%, at least 93%, at least 94%, at least 95%, at least 96%, at least 97%, at least 98%, or at least 99% sequence identity to SEQ ID NO: 1, provided that the amino acid sequence comprises mutations of S128A, L153P, K324I, F333N, N219G, wherein the positions correspond to SEQ ID NO: 1. In some embodiments, the polypeptide having protease activity comprises an amino acid sequence having at least 50%, at least 60%, at least 70%, at least 80%, at least 81%, at least 82%, at least 83%, at least 84%, at least 85%, at least 86%, at least 87%, at least 88%, at least 89%, at least 90%, at least 91%, at least 92%, at least 93%, at least 94%, at least 95%, at least 96%, at least 97%, at least 98%, or at least 99% sequence identity to SEQ ID NO: 1, provided that the amino acid sequence comprises mutations of S128A, L153P, K324I, F333N, N219T, wherein the positions correspond to SEQ ID NO: 1. In some embodiments, the polypeptide having protease activity comprises an amino acid sequence having at least 50%, at least 60%, at least 70%, at least 80%, at least 81%, at least 82%, at least 83%, at least 84%, at least 85%, at least 86%, at least 87%, at least 88%, at least 89%, at least 90%, at least 91%, at least 92%, at least 93%, at least 94%, at least 95%, at least 96%, at least 97%, at least 98%, or at least 99% sequence identity to SEQ ID NO: 1, provided that the amino acid sequence comprises mutations of S128A, L153P, K324I, F333N, K318S, N316S, wherein the positions correspond to SEQ ID NO: 1. In some embodiments, the polypeptide having protease activity comprises an amino acid sequence having at least 50%, at least 60%, at least 70%, at least 80%, at least 81%, at least 82%, at least 83%, at least 84%, at least 85%, at least 86%, at least 87%, at least 88%, at least 89%, at least 90%, at least 91%, at least 92%, at least 93%, at least 94%, at least 95%, at least 96%, at least 97%, at least 98%, or at least 99% sequence identity to SEQ ID NO: 1, provided that the amino acid sequence comprises mutations of S128A, L153P, K324I, F333N, K318S, N316Q, wherein the positions correspond to SEQ ID NO: 1. In some embodiments, the polypeptide having protease activity comprises an amino acid sequence having at least 50%, at least 60%, at least 70%, at least 80%, at least 81%, at least 82%, at least 83%, at least 84%, at least 85%, at least 86%, at least 87%, at least 88%, at least 89%, at least 90%, at least 91%, at least 92%, at least 93%, at least 94%, at least 95%, at least 96%, at least 97%, at least 98%, or at least 99% sequence identity to SEQ ID NO: 1, provided that the amino acid sequence comprises mutations of S128A, L153P, K324I, F333N, S221E, wherein the positions correspond to SEQ ID NO: 1. In some embodiments, the polypeptide having protease activity comprises an amino acid sequence having at least 50%, at least 60%, at least 70%, at least 80%, at least 81%, at least 82%, at least 83%, at least 84%, at least 85%, at least 86%, at least 87%, at least 88%, at least 89%, at least 90%, at least 91%, at least 92%, at least 93%, at least 94%, at least 95%, at least 96%, at least 97%, at least 98%, or at least 99% sequence identity to SEQ ID NO: 1, provided that the amino acid sequence comprises mutations of S128A, L153P, K324I, F333N, N219K, wherein the positions correspond to SEQ ID NO: 1. In some embodiments, the polypeptide having protease activity comprises an amino acid sequence having at least 50%, at least 60%, at least 70%, at least 80%, at least 81%, at least 82%, at least 83%, at least 84%, at least 85%, at least 86%, at least 87%, at least 88%, at least 89%, at least 90%, at least 91%, at least 92%, at least 93%, at least 94%, at least 95%, at least 96%, at least 97%, at least 98%, or at least 99% sequence identity to SEQ ID NO: 1, provided that the amino acid sequence comprises mutations of S128A, L153P, K324I, F333N, Y252R, wherein the positions correspond to SEQ ID NO: 1. In some embodiments, the polypeptide having protease activity comprises an amino acid sequence having at least 50%, at least 60%, at least 70%, at least 80%, at least 81%, at least 82%, at least 83%, at least 84%, at least 85%, at least 86%, at least 87%, at least 88%, at least 89%, at least 90%, at least 91%, at least 92%, at least 93%, at least 94%, at least 95%, at least 96%, at least 97%, at least 98%, or at least 99% sequence identity to SEQ ID NO: 1, provided that the amino acid sequence comprises mutations of S128A, L153P, K324I, F333N, R250GYG, S251I, wherein the positions correspond to SEQ ID NO: 1. In some embodiments, the polypeptide having protease activity comprises an amino acid sequence having at least 50%, at least 60%, at least 70%, at least 80%, at least 81%, at least 82%, at least 83%, at least 84%, at least 85%, at least 86%, at least 87%, at least 88%, at least 89%, at least 90%, at least 91%, at least 92%, at least 93%, at least 94%, at least 95%, at least 96%, at least 97%, at least 98%, or at least 99% sequence identity to SEQ ID NO: 1, provided that the amino acid sequence comprises mutations of S128A, L153P, K324I, F333N, R250GGYGG (SEQ ID NO: 918), S251I, wherein the positions correspond to SEQ ID NO: 1. In some embodiments, the polypeptide having protease activity comprises an amino acid sequence having at least 50%, at least 60%, at least 70%, at least 80%, at least 81%, at least 82%, at least 83%, at least 84%, at least 85%, at least 86%, at least 87%, at least 88%, at least 89%, at least 90%, at least 91%, at least 92%, at least 93%, at least 94%, at least 95%, at least 96%, at least 97%, at least 98%, or at least 99% sequence identity to SEQ ID NO: 1, provided that the amino acid sequence comprises mutations of S128A, L153P, K324I, F333N, P205L, E206T, wherein the positions correspond to SEQ ID NO: 1. In some embodiments, the polypeptide having protease activity comprises an amino acid sequence having at least 50%, at least 60%, at least 70%, at least 80%, at least 81%, at least 82%, at least 83%, at least 84%, at least 85%, at least 86%, at least 87%, at least 88%, at least 89%, at least 90%, at least 91%, at least 92%, at least 93%, at least 94%, at least 95%, at least 96%, at least 97%, at least 98%, or at least 99% sequence identity to SEQ ID NO: 1, provided that the amino acid sequence comprises mutations of S128A, L153P, K324I, F333N, P205F, E206T, wherein the positions correspond to SEQ ID NO: 1. In some embodiments, the polypeptide having protease activity comprises an amino acid sequence having at least 50%, at least 60%, at least 70%, at least 80%, at least 81%, at least 82%, at least 83%, at least 84%, at least 85%, at least 86%, at least 87%, at least 88%, at least 89%, at least 90%, at least 91%, at least 92%, at least 93%, at least 94%, at least 95%, at least 96%, at least 97%, at least 98%, or at least 99% sequence identity to SEQ ID NO: 1, provided that the amino acid sequence comprises mutations of S128A, L153P, K324I, F333N, P205LG, E206T, wherein the positions correspond to SEQ ID NO: 1. In some embodiments, the polypeptide having protease activity comprises an amino acid sequence having at least 50%, at least 60%, at least 70%, at least 80%, at least 81%, at least 82%, at least 83%, at least 84%, at least 85%, at least 86%, at least 87%, at least 88%, at least 89%, at least 90%, at least 91%, at least 92%, at least 93%, at least 94%, at least 95%, at least 96%, at least 97%, at least 98%, or at least 99% sequence identity to SEQ ID NO: 1, provided that the amino acid sequence comprises mutations of S128A, L153P, K324I, F333N, P205FG, E206T, wherein the positions correspond to SEQ ID NO: 1. In some embodiments, the polypeptide having protease activity comprises an amino acid sequence having at least 50%, at least 60%, at least 70%, at least 80%, at least 81%, at least 82%, at least 83%, at least 84%, at least 85%, at least 86%, at least 87%, at least 88%, at least 89%, at least 90%, at least 91%, at least 92%, at least 93%, at least 94%, at least 95%, at least 96%, at least 97%, at least 98%, or at least 99% sequence identity to SEQ ID NO: 1, provided that the amino acid sequence comprises mutations of S128A, L153P, K324I, F333N, P205FG, E206T, R250GYG, S251I, wherein the positions correspond to SEQ ID NO: 1. In some embodiments, the polypeptide having protease activity comprises an amino acid sequence having at least 50%, at least 60%, at least 70%, at least 80%, at least 81%, at least 82%, at least 83%, at least 84%, at least 85%, at least 86%, at least 87%, at least 88%, at least 89%, at least 90%, at least 91%, at least 92%, at least 93%, at least 94%, at least 95%, at least 96%, at least 97%, at least 98%, or at least 99% sequence identity to SEQ ID NO: 1, provided that the amino acid sequence comprises mutations of S128A, L153P, K324I, F333N, K149L, I262K, T276G, V364E, P205FG, E206T, R250GYG, S251I, wherein the positions correspond to SEQ ID NO: 1. In some embodiments, the polypeptide having protease activity comprises an amino acid sequence having at least 50%, at least 60%, at least 70%, at least 80%, at least 81%, at least 82%, at least 83%, at least 84%, at least 85%, at least 86%, at least 87%, at least 88%, at least 89%, at least 90%, at least 91%, at least 92%, at least 93%, at least 94%, at least 95%, at least 96%, at least 97%, at least 98%, or at least 99% sequence identity to SEQ ID NO: 1, provided that the amino acid sequence comprises mutations of S128A, L153P, K324I, F333N, K149L, G199P, I262K, T276G, V364E, wherein the positions correspond to SEQ ID NO: 1. In some embodiments, the polypeptide having protease activity comprises an amino acid sequence having at least 50%, at least 60%, at least 70%, at least 80%, at least 81%, at least 82%, at least 83%, at least 84%, at least 85%, at least 86%, at least 87%, at least 88%, at least 89%, at least 90%, at least 91%, at least 92%, at least 93%, at least 94%, at least 95%, at least 96%, at least 97%, at least 98%, or at least 99% sequence identity to SEQ ID NO: 1, provided that the amino acid sequence comprises mutations of S128A, L153P, K324I, F333N, K116D, K149L, N182D, K196D, I262K, T276G, V364E, wherein the positions correspond to SEQ ID NO: 1. In some embodiments, the polypeptide having protease activity comprises an amino acid sequence having at least 50%, at least 60%, at least 70%, at least 80%, at least 81%, at least 82%, at least 83%, at least 84%, at least 85%, at least 86%, at least 87%, at least 88%, at least 89%, at least 90%, at least 91%, at least 92%, at least 93%, at least 94%, at least 95%, at least 96%, at least 97%, at least 98%, or at least 99% sequence identity to SEQ ID NO: 1, provided that the amino acid sequence comprises mutations of S128A, L153P, K324I, F333N, S94E, K116D, K149L, N182D, K196D, I262K, T276G, 1336A, V364E, wherein the positions correspond to SEQ ID NO: 1. In some embodiments, the polypeptide having protease activity comprises an amino acid sequence having at least 50%, at least 60%, at least 70%, at least 80%, at least 81%, at least 82%, at least 83%, at least 84%, at least 85%, at least 86%, at least 87%, at least 88%, at least 89%, at least 90%, at least 91%, at least 92%, at least 93%, at least 94%, at least 95%, at least 96%, at least 97%, at least 98%, or at least 99% sequence identity to SEQ ID NO: 1, provided that the amino acid sequence comprises mutations of S128A, L153P, K324I, F333N, S94E, K116D, K149L, N182D, K196D, Y224T, I262K, T276G, I336A, V364E, wherein the positions correspond to SEQ ID NO: 1. In some embodiments, the polypeptide having protease activity comprises an amino acid sequence having at least 50%, at least 60%, at least 70%, at least 80%, at least 81%, at least 82%, at least 83%, at least 84%, at least 85%, at least 86%, at least 87%, at least 88%, at least 89%, at least 90%, at least 91%, at least 92%, at least 93%, at least 94%, at least 95%, at least 96%, at least 97%, at least 98%, or at least 99% sequence identity to SEQ ID NO: 1, provided that the amino acid sequence comprises mutations of S128A, L153P, K324I, F333N, S94E, K116D, K149L, N182D, K196D, Y224T, I262K, T276G, Y281T, 1336A, V364E, wherein the positions correspond to SEQ ID NO: 1. In some embodiments, the polypeptide having protease activity comprises an amino acid sequence having at least 50%, at least 60%, at least 70%, at least 80%, at least 81%, at least 82%, at least 83%, at least 84%, at least 85%, at least 86%, at least 87%, at least 88%, at least 89%, at least 90%, at least 91%, at least 92%, at least 93%, at least 94%, at least 95%, at least 96%, at least 97%, at least 98%, or at least 99% sequence identity to SEQ ID NO: 1, provided that the amino acid sequence comprises mutations of S128A, L153P, K324I, F333N, S94E, K116D, K149L, N182D, K196D, Y224T, I262K, T276G, Y281T, I336A, V364E, H174E, wherein the positions correspond to SEQ ID NO: 1. In some embodiments, the polypeptide having protease activity comprises an amino acid sequence having at least 50%, at least 60%, at least 70%, at least 80%, at least 81%, at least 82%, at least 83%, at least 84%, at least 85%, at least 86%, at least 87%, at least 88%, at least 89%, at least 90%, at least 91%, at least 92%, at least 93%, at least 94%, at least 95%, at least 96%, at least 97%, at least 98%, or at least 99% sequence identity to SEQ ID NO: 1, provided that the amino acid sequence comprises mutations of S128A, L153P, K324I, F333N, S94E, K116D, K149L, N182D, K196D, Y224T, V270P, T276G, Y281T, 1336A, V364E, wherein the positions correspond to SEQ ID NO: 1. In some embodiments, the polypeptide having protease activity comprises an amino acid sequence having at least 50%, at least 60%, at least 70%, at least 80%, at least 81%, at least 82%, at least 83%, at least 84%, at least 85%, at least 86%, at least 87%, at least 88%, at least 89%, at least 90%, at least 91%, at least 92%, at least 93%, at least 94%, at least 95%, at least 96%, at least 97%, at least 98%, or at least 99% sequence identity to SEQ ID NO: 1, provided that the amino acid sequence comprises mutations of S128A, L153P, K324I, F333N, S94E, K116D, K149L, N182D, K196D, Y224T, V270P, V274G, Y281T, 1336A, V364E, wherein the positions correspond to SEQ ID NO: 1. In some embodiments, the polypeptide having protease activity comprises an amino acid sequence having at least 50%, at least 60%, at least 70%, at least 80%, at least 81%, at least 82%, at least 83%, at least 84%, at least 85%, at least 86%, at least 87%, at least 88%, at least 89%, at least 90%, at least 91%, at least 92%, at least 93%, at least 94%, at least 95%, at least 96%, at least 97%, at least 98%, or at least 99% sequence identity to SEQ ID NO: 1, provided that the amino acid sequence comprises mutations of S128A, L153P, K324I, F333N, S94E, K116D, K149L, N182D, G199P, Y224T, V270P, V274G, Y281T, 1336A, V364E, wherein the positions correspond to SEQ ID NO: 1. In some embodiments, the polypeptide having protease activity comprises an amino acid sequence having at least 50%, at least 60%, at least 70%, at least 80%, at least 81%, at least 82%, at least 83%, at least 84%, at least 85%, at least 86%, at least 87%, at least 88%, at least 89%, at least 90%, at least 91%, at least 92%, at least 93%, at least 94%, at least 95%, at least 96%, at least 97%, at least 98%, or at least 99% sequence identity to SEQ ID NO: 1, provided that the amino acid sequence comprises mutations of S128A, L153P, K324I, F333N, K149L, K196D, I262K, T276G, V364E, wherein the positions correspond to SEQ ID NO: 1. In some embodiments, the polypeptide having protease activity comprises an amino acid sequence having at least 50%, at least 60%, at least 70%, at least 80%, at least 81%, at least 82%, at least 83%, at least 84%, at least 85%, at least 86%, at least 87%, at least 88%, at least 89%, at least 90%, at least 91%, at least 92%, at least 93%, at least 94%, at least 95%, at least 96%, at least 97%, at least 98%, or at least 99% sequence identity to SEQ ID NO: 1, provided that the amino acid sequence comprises mutations of S128A, L153P, K324I, F333N, I262K, V274G, Y281T, wherein the positions correspond to SEQ ID NO: 1. In some embodiments, the polypeptide having protease activity comprises an amino acid sequence having at least 50%, at least 60%, at least 70%, at least 80%, at least 81%, at least 82%, at least 83%, at least 84%, at least 85%, at least 86%, at least 87%, at least 88%, at least 89%, at least 90%, at least 91%, at least 92%, at least 93%, at least 94%, at least 95%, at least 96%, at least 97%, at least 98%, or at least 99% sequence identity to SEQ ID NO: 1, provided that the amino acid sequence comprises mutations of S128A, L153P, K324I, F333N, G199P, I262K, T276G, Y281T, wherein the positions correspond to SEQ ID NO: 1. In some embodiments, the polypeptide having protease activity comprises an amino acid sequence having at least 50%, at least 60%, at least 70%, at least 80%, at least 81%, at least 82%, at least 83%, at least 84%, at least 85%, at least 86%, at least 87%, at least 88%, at least 89%, at least 90%, at least 91%, at least 92%, at least 93%, at least 94%, at least 95%, at least 96%, at least 97%, at least 98%, or at least 99% sequence identity to SEQ ID NO: 1, provided that the amino acid sequence comprises mutations of S128A, L153P, K324I, F333N, K196D, I262K, T276G, Y281T, wherein the positions correspond to SEQ ID NO: 1. In some embodiments, the polypeptide having protease activity comprises an amino acid sequence having at least 50%, at least 60%, at least 70%, at least 80%, at least 81%, at least 82%, at least 83%, at least 84%, at least 85%, at least 86%, at least 87%, at least 88%, at least 89%, at least 90%, at least 91%, at least 92%, at least 93%, at least 94%, at least 95%, at least 96%, at least 97%, at least 98%, or at least 99% sequence identity to SEQ ID NO: 1, provided that the amino acid sequence comprises mutations of S128A, L153P, K324I, F333N, G199P, Y224T, I262K, T276G, Y281T, wherein the positions correspond to SEQ ID NO: 1. In some embodiments, the polypeptide having protease activity comprises an amino acid sequence having at least 50%, at least 60%, at least 70%, at least 80%, at least 81%, at least 82%, at least 83%, at least 84%, at least 85%, at least 86%, at least 87%, at least 88%, at least 89%, at least 90%, at least 91%, at least 92%, at least 93%, at least 94%, at least 95%, at least 96%, at least 97%, at least 98%, or at least 99% sequence identity to SEQ ID NO: 1, provided that the amino acid sequence comprises mutations of S128A, L153P, K324I, F333N, G199P, Y224T, I262K, T276G, Y281T, 1336A, wherein the positions correspond to SEQ ID NO: 1. In some embodiments, the polypeptide having protease activity comprises an amino acid sequence having at least 50%, at least 60%, at least 70%, at least 80%, at least 81%, at least 82%, at least 83%, at least 84%, at least 85%, at least 86%, at least 87%, at least 88%, at least 89%, at least 90%, at least 91%, at least 92%, at least 93%, at least 94%, at least 95%, at least 96%, at least 97%, at least 98%, or at least 99% sequence identity to SEQ ID NO: 1, provided that the amino acid sequence comprises mutations of S128A, L153P, K324I, F333N, K149L, G199P, Y224T, I262K, T276G, Y281T, 1336A, V364E, wherein the positions correspond to SEQ ID NO: 1. In some embodiments, the polypeptide having protease activity comprises an amino acid sequence having at least 50%, at least 60%, at least 70%, at least 80%, at least 81%, at least 82%, at least 83%, at least 84%, at least 85%, at least 86%, at least 87%, at least 88%, at least 89%, at least 90%, at least 91%, at least 92%, at least 93%, at least 94%, at least 95%, at least 96%, at least 97%, at least 98%, or at least 99% sequence identity to SEQ ID NO: 1, provided that the amino acid sequence comprises mutations of S128A, L153P, K324I, F333N, K149L, K196D, Y224T, I262K, T276G, Y281T, 1336A, V364E, wherein the positions correspond to SEQ ID NO: 1. In some embodiments, the polypeptide having protease activity comprises an amino acid sequence having at least 50%, at least 60%, at least 70%, at least 80%, at least 81%, at least 82%, at least 83%, at least 84%, at least 85%, at least 86%, at least 87%, at least 88%, at least 89%, at least 90%, at least 91%, at least 92%, at least 93%, at least 94%, at least 95%, at least 96%, at least 97%, at least 98%, or at least 99% sequence identity to SEQ ID NO: 1, provided that the amino acid sequence comprises mutations of S128A, L153P, K324I, F333N, K149L, G199P, Y224T, I262K, T276G, Y281T, 1336A, V364E, H174E, wherein the positions correspond to SEQ ID NO: 1. In some embodiments, the polypeptide having protease activity comprises an amino acid sequence having at least 50%, at least 60%, at least 70%, at least 80%, at least 81%, at least 82%, at least 83%, at least 84%, at least 85%, at least 86%, at least 87%, at least 88%, at least 89%, at least 90%, at least 91%, at least 92%, at least 93%, at least 94%, at least 95%, at least 96%, at least 97%, at least 98%, or at least 99% sequence identity to SEQ ID NO: 1, provided that the amino acid sequence comprises mutations of S128A, L153P, K324I, F333N, S94E, K116D, K149L, N182D, K196D, Y224T, I262K, T276G, Y281T, V303I, 1336A, V364E, wherein the positions correspond to SEQ ID NO: 1. In some embodiments, the polypeptide having protease activity comprises an amino acid sequence having at least 50%, at least 60%, at least 70%, at least 80%, at least 81%, at least 82%, at least 83%, at least 84%, at least 85%, at least 86%, at least 87%, at least 88%, at least 89%, at least 90%, at least 91%, at least 92%, at least 93%, at least 94%, at least 95%, at least 96%, at least 97%, at least 98%, or at least 99% sequence identity to SEQ ID NO: 1, provided that the amino acid sequence comprises mutations of, T122S, S128A, L153P, F333N, K324I, N162E, K229E, H275Y, N219G, H174E, 177_183delinsRDNRDN (SEQ ID NO: 919), wherein the positions correspond to SEQ ID NO: 1. In some embodiments, the polypeptide having protease activity comprises an amino acid sequence having at least 50%, at least 60%, at least 70%, at least 80%, at least 81%, at least 82%, at least 83%, at least 84%, at least 85%, at least 86%, at least 87%, at least 88%, at least 89%, at least 90%, at least 91%, at least 92%, at least 93%, at least 94%, at least 95%, at least 96%, at least 97%, at least 98%, or at least 99% sequence identity to SEQ ID NO: 1, provided that the amino acid sequence comprises mutations of S128A, L153P, K324I, F333N, 311_321delinsLSNVEALGYNITSGYSDKRY (SEQ ID NO: 939), wherein the positions correspond to SEQ ID NO: 1. In some embodiments, the polypeptide having protease activity comprises an amino acid sequence having at least 50%, at least 60%, at least 70%, at least 80%, at least 81%, at least 82%, at least 83%, at least 84%, at least 85%, at least 86%, at least 87%, at least 88%, at least 89%, at least 90%, at least 91%, at least 92%, at least 93%, at least 94%, at least 95%, at least 96%, at least 97%, at least 98%, or at least 99% sequence identity to SEQ ID NO: 1, provided that the amino acid sequence comprises mutations of S128A, L153P, K324I, F333N, 310_320delinsFLVFGVTYDGSTPVP (SEQ ID NO: 940), wherein the positions correspond to SEQ ID NO: 1. In some embodiments, the polypeptide having protease activity comprises an amino acid sequence having at least 50%, at least 60%, at least 70%, at least 80%, at least 81%, at least 82%, at least 83%, at least 84%, at least 85%, at least 86%, at least 87%, at least 88%, at least 89%, at least 90%, at least 91%, at least 92%, at least 93%, at least 94%, at least 95%, at least 96%, at least 97%, at least 98%, or at least 99% sequence identity to SEQ ID NO: 1, provided that the amino acid sequence comprises mutations of S128A, L153P, K324I, F333N, 307_322delinsLAKGNNYFGHWHFAVM (SEQ ID NO: 936), wherein the positions correspond to SEQ ID NO: 1. In some embodiments, the polypeptide having protease activity comprises an amino acid sequence having at least 50%, at least 60%, at least 70%, at least 80%, at least 81%, at least 82%, at least 83%, at least 84%, at least 85%, at least 86%, at least 87%, at least 88%, at least 89%, at least 90%, at least 91%, at least 92%, at least 93%, at least 94%, at least 95%, at least 96%, at least 97%, at least 98%, or at least 99% sequence identity to SEQ ID NO: 1, provided that the amino acid sequence comprises mutations of S128A, L153P, K324I, F333N, 86_105delinsDDMEAKGNNYFGHWHFAVATN (SEQ ID NO: 941), wherein the positions correspond to SEQ ID NO: 1. In some embodiments, the polypeptide having protease activity comprises an amino acid sequence having at least 50%, at least 60%, at least 70%, at least 80%, at least 81%, at least 82%, at least 83%, at least 84%, at least 85%, at least 86%, at least 87%, at least 88%, at least 89%, at least 90%, at least 91%, at least 92%, at least 93%, at least 94%, at least 95%, at least 96%, at least 97%, at least 98%, or at least 99% sequence identity to SEQ ID NO: 1, provided that the amino acid sequence comprises mutations of S128A, L153P, K324I, F333N, 271_287delinsVGISGSAGGIKSVDSDGDSYI (SEQ ID NO: 932), wherein the positions correspond to SEQ ID NO: 1. In some embodiments, the polypeptide having protease activity comprises an amino acid sequence having at least 50%, at least 60%, at least 70%, at least 80%, at least 81%, at least 82%, at least 83%, at least 84%, at least 85%, at least 86%, at least 87%, at least 88%, at least 89%, at least 90%, at least 91%, at least 92%, at least 93%, at least 94%, at least 95%, at least 96%, at least 97%, at least 98%, or at least 99% sequence identity to SEQ ID NO: 1, provided that the amino acid sequence comprises mutations of S128A, L153P, K324I, F333N, 91_100delinsGGGGGKSVDSDGDSYGGGGG (SEQ ID NO: 943), wherein the positions correspond to SEQ ID NO: 1. In some embodiments, the polypeptide having protease activity comprises an amino acid sequence having at least 50%, at least 60%, at least 70%, at least 80%, at least 81%, at least 82%, at least 83%, at least 84%, at least 85%, at least 86%, at least 87%, at least 88%, at least 89%, at least 90%, at least 91%, at least 92%, at least 93%, at least 94%, at least 95%, at least 96%, at least 97%, at least 98%, or at least 99% sequence identity to SEQ ID NO: 1, provided that the amino acid sequence comprises mutations of S128A, L153P, K324I, F333N, 308_324delinsTKSVDSDGDSYKINY (SEQ ID NO: 932), wherein the positions correspond to SEQ ID NO: 1. In some embodiments, the polypeptide having protease activity comprises an amino acid sequence having at least 50%, at least 60%, at least 70%, at least 80%, at least 81%, at least 82%, at least 83%, at least 84%, at least 85%, at least 86%, at least 87%, at least 88%, at least 89%, at least 90%, at least 91%, at least 92%, at least 93%, at least 94%, at least 95%, at least 96%, at least 97%, at least 98%, or at least 99% sequence identity to SEQ ID NO: 1, provided that the amino acid sequence comprises mutations of S128A, L153P, K324I, F333N, 311_319delinsLLKPKILGYNITSGYSDEIY (SEQ ID NO: 938), wherein the positions correspond to SEQ ID NO: 1. In some embodiments, the polypeptide having protease activity comprises an amino acid sequence having at least 50%, at least 60%, at least 70%, at least 80%, at least 81%, at least 82%, at least 83%, at least 84%, at least 85%, at least 86%, at least 87%, at least 88%, at least 89%, at least 90%, at least 91%, at least 92%, at least 93%, at least 94%, at least 95%, at least 96%, at least 97%, at least 98%, or at least 99% sequence identity to SEQ ID NO: 1, provided that the amino acid sequence comprises mutations of S128A, L153P, K324I, F333N, 315_317delins VTYDGST (SEQ ID NO: 946), wherein the positions correspond to SEQ ID NO: 1. In some embodiments, the polypeptide having protease activity comprises an amino acid sequence having at least 50%, at least 60%, at least 70%, at least 80%, at least 81%, at least 82%, at least 83%, at least 84%, at least 85%, at least 86%, at least 87%, at least 88%, at least 89%, at least 90%, at least 91%, at least 92%, at least 93%, at least 94%, at least 95%, at least 96%, at least 97%, at least 98%, or at least 99% sequence identity to SEQ ID NO: 1, provided that the amino acid sequence comprises mutations of S128A, L153P, K324I, F333N, 303_326delinsTGAKGNNYFGHWHFAVRVRL (SEQ ID NO: 933), wherein the positions correspond to SEQ ID NO: 1. In some embodiments, the polypeptide having protease activity comprises an amino acid sequence having at least 50%, at least 60%, at least 70%, at least 80%, at least 81%, at least 82%, at least 83%, at least 84%, at least 85%, at least 86%, at least 87%, at least 88%, at least 89%, at least 90%, at least 91%, at least 92%, at least 93%, at least 94%, at least 95%, at least 96%, at least 97%, at least 98%, or at least 99% sequence identity to SEQ ID NO: 1, provided that the amino acid sequence comprises mutations of S128A, L153P, K324I, F333N, 93_98delinsGGGGGKSVDSDGDSYGGGGG (SEQ ID NO: 943), wherein the positions correspond to SEQ ID NO: 1. In some embodiments, the polypeptide having protease activity comprises an amino acid sequence having at least 50%, at least 60%, at least 70%, at least 80%, at least 81%, at least 82%, at least 83%, at least 84%, at least 85%, at least 86%, at least 87%, at least 88%, at least 89%, at least 90%, at least 91%, at least 92%, at least 93%, at least 94%, at least 95%, at least 96%, at least 97%, at least 98%, or at least 99% sequence identity to SEQ ID NO: 1, provided that the amino acid sequence comprises mutations of S128A, L153P, K324I, F333N, 174_187delinsVMYKGKKLLEAARAGQPDSSE (SEQ ID NO: 945), wherein the positions correspond to SEQ ID NO: 1. In some embodiments, the polypeptide having protease activity comprises an amino acid sequence having at least 50%, at least 60%, at least 70%, at least 80%, at least 81%, at least 82%, at least 83%, at least 84%, at least 85%, at least 86%, at least 87%, at least 88%, at least 89%, at least 90%, at least 91%, at least 92%, at least 93%, at least 94%, at least 95%, at least 96%, at least 97%, at least 98%, or at least 99% sequence identity to SEQ ID NO: 1, provided that the amino acid sequence comprises mutations of S128A, L153P, K324I, F333N, 306_324delinsGHYGVYNGVTYWGHTPLHLAAMLGHLVYGLY (SEQ ID NO: 934), wherein the positions correspond to SEQ ID NO: 1. In some embodiments, the polypeptide having protease activity comprises an amino acid sequence having at least 50%, at least 60%, at least 70%, at least 80%, at least 81%, at least 82%, at least 83%, at least 84%, at least 85%, at least 86%, at least 87%, at least 88%, at least 89%, at least 90%, at least 91%, at least 92%, at least 93%, at least 94%, at least 95%, at least 96%, at least 97%, at least 98%, or at least 99% sequence identity to SEQ ID NO: 1, provided that the amino acid sequence comprises mutations of S128A, L153P, K324I, F333N, 306_324delinsQRTPLHLAAWADHLYR (SEQ ID NO: 935), wherein the positions correspond to SEQ ID NO: 1. In some embodiments, the polypeptide having protease activity comprises an amino acid sequence having at least 50%, at least 60%, at least 70%, at least 80%, at least 81%, at least 82%, at least 83%, at least 84%, at least 85%, at least 86%, at least 87%, at least 88%, at least 89%, at least 90%, at least 91%, at least 92%, at least 93%, at least 94%, at least 95%, at least 96%, at least 97%, at least 98%, or at least 99% sequence identity to SEQ ID NO: 1, provided that the amino acid sequence comprises mutations of S128A, L153P, K324I, F333N, 307_324delinsGGFAFDISIDNGNEDVY (SEQ ID NO: 937), wherein the positions correspond to SEQ ID NO: 1. In some embodiments, the polypeptide having protease activity comprises an amino acid sequence having at least 50%, at least 60%, at least 70%, at least 80%, at least 81%, at least 82%, at least 83%, at least 84%, at least 85%, at least 86%, at least 87%, at least 88%, at least 89%, at least 90%, at least 91%, at least 92%, at least 93%, at least 94%, at least 95%, at least 96%, at least 97%, at least 98%, or at least 99% sequence identity to SEQ ID NO: 1, provided that the amino acid sequence comprises mutations of S128A, L153P, K324I, F333N, 88_102delinsGEIVAFDISIDNGNEDLAEILQLSTYDGGG (SEQ ID NO: 942), wherein the positions correspond to SEQ ID NO: 1. In some embodiments, the polypeptide having protease activity comprises an amino acid sequence having at least 50%, at least 60%, at least 70%, at least 80%, at least 81%, at least 82%, at least 83%, at least 84%, at least 85%, at least 86%, at least 87%, at least 88%, at least 89%, at least 90%, at least 91%, at least 92%, at least 93%, at least 94%, at least 95%, at least 96%, at least 97%, at least 98%, or at least 99% sequence identity to SEQ ID NO: 1, provided that the amino acid sequence comprises mutations of S128A, L153P, K324I, F333N, 311_321delinsLSNVEALGYNITSGYSDKRY (SEQ ID NO: 939), 86_105delinsDDMEAKGNNYFGHWHFAVATN (SEQ ID NO: 941), 271_287delinsVGISGSAGGIKSVDSDGDSYI (SEQ ID NO: 932), wherein the positions correspond to SEQ ID NO: 1. In some embodiments, the polypeptide having protease activity comprises an amino acid sequence having at least 50%, at least 60%, at least 70%, at least 80%, at least 81%, at least 82%, at least 83%, at least 84%, at least 85%, at least 86%, at least 87%, at least 88%, at least 89%, at least 90%, at least 91%, at least 92%, at least 93%, at least 94%, at least 95%, at least 96%, at least 97%, at least 98%, or at least 99% sequence identity to SEQ ID NO: 1, provided that the amino acid sequence comprises mutations of S128A, L153P, K324I, F333N, 311_321delinsLSNVEALGYNITSGYSDKRY (SEQ ID NO: 939), 86_105delinsDDMEAKGNNYFGHWHFAVATN (SEQ ID NO: 941), wherein the positions correspond to SEQ ID NO: 1. In some embodiments, the polypeptide having protease activity comprises an amino acid sequence having at least 50%, at least 60%, at least 70%, at least 80%, at least 81%, at least 82%, at least 83%, at least 84%, at least 85%, at least 86%, at least 87%, at least 88%, at least 89%, at least 90%, at least 91%, at least 92%, at least 93%, at least 94%, at least 95%, at least 96%, at least 97%, at least 98%, or at least 99% sequence identity to SEQ ID NO: 1, provided that the amino acid sequence comprises mutations of S128A, L153P, K324I, F333N, 311_321delinsLSNVEALGYNITSGYSDKRY (SEQ ID NO: 939), 91_100delinsGGGGGKSVDSDGDSYGGGGG (SEQ ID NO: 943), wherein the positions correspond to SEQ ID NO: 1. In some embodiments, the polypeptide having protease activity comprises an amino acid sequence having at least 50%, at least 60%, at least 70%, at least 80%, at least 81%, at least 82%, at least 83%, at least 84%, at least 85%, at least 86%, at least 87%, at least 88%, at least 89%, at least 90%, at least 91%, at least 92%, at least 93%, at least 94%, at least 95%, at least 96%, at least 97%, at least 98%, or at least 99% sequence identity to SEQ ID NO: 1, provided that the amino acid sequence comprises mutations of S128A, L153P, K324I, F333N, 311_321delinsLSNVEALGYNITSGYSDKRY (SEQ ID NO: 939), 271_287delinsVGISGSAGGIKSVDSDGDSYI (SEQ ID NO: 932), wherein the positions correspond to SEQ ID NO: 1. In some embodiments, the polypeptide having protease activity comprises an amino acid sequence having at least 50%, at least 60%, at least 70%, at least 80%, at least 81%, at least 82%, at least 83%, at least 84%, at least 85%, at least 86%, at least 87%, at least 88%, at least 89%, at least 90%, at least 91%, at least 92%, at least 93%, at least 94%, at least 95%, at least 96%, at least 97%, at least 98%, or at least 99% sequence identity to SEQ ID NO: 1, provided that the amino acid sequence comprises mutations of S128A, L153P, K324I, F333N, 310_320delinsFLVFGVTYDGSTPVP (SEQ ID NO: 940), 86_105delinsDDMEAKGNNYFGHWHFAVATN (SEQ ID NO: 941), 271_287delinsVGISGSAGGIKSVDSDGDSYI (SEQ ID NO: 932), wherein the positions correspond to SEQ ID NO: 1. In some embodiments, the polypeptide having protease activity comprises an amino acid sequence having at least 50%, at least 60%, at least 70%, at least 80%, at least 81%, at least 82%, at least 83%, at least 84%, at least 85%, at least 86%, at least 87%, at least 88%, at least 89%, at least 90%, at least 91%, at least 92%, at least 93%, at least 94%, at least 95%, at least 96%, at least 97%, at least 98%, or at least 99% sequence identity to SEQ ID NO: 1, provided that the amino acid sequence comprises mutations of S128A, L153P, K324I, F333N, 310_320delinsFLVFGVTYDGSTPVP (SEQ ID NO: 940), 86_105delinsDDMEAKGNNYFGHWHFAVATN (SEQ ID NO: 941), wherein the positions correspond to SEQ ID NO: 1. In some embodiments, the polypeptide having protease activity comprises an amino acid sequence having at least 50%, at least 60%, at least 70%, at least 80%, at least 81%, at least 82%, at least 83%, at least 84%, at least 85%, at least 86%, at least 87%, at least 88%, at least 89%, at least 90%, at least 91%, at least 92%, at least 93%, at least 94%, at least 95%, at least 96%, at least 97%, at least 98%, or at least 99% sequence identity to SEQ ID NO: 1, provided that the amino acid sequence comprises mutations of S128A, L153P, K324I, F333N, 310_320delinsFLVFGVTYDGSTPVP (SEQ ID NO: 940), 91_100delinsGGGGGKSVDSDGDSYGGGGG (SEQ ID NO: 943), wherein the positions correspond to SEQ ID NO: 1. In some embodiments, the polypeptide having protease activity comprises an amino acid sequence having at least 50%, at least 60%, at least 70%, at least 80%, at least 81%, at least 82%, at least 83%, at least 84%, at least 85%, at least 86%, at least 87%, at least 88%, at least 89%, at least 90%, at least 91%, at least 92%, at least 93%, at least 94%, at least 95%, at least 96%, at least 97%, at least 98%, or at least 99% sequence identity to SEQ ID NO: 1, provided that the amino acid sequence comprises mutations of S128A, L153P, K324I, F333N, 310_320delinsFLVFGVTYDGSTPVP (SEQ ID NO: 940), 271_287delinsVGISGSAGGIKSVDSDGDSYI (SEQ ID NO: 932), wherein the positions correspond to SEQ ID NO: 1. In some embodiments, the polypeptide having protease activity comprises an amino acid sequence having at least 50%, at least 60%, at least 70%, at least 80%, at least 81%, at least 82%, at least 83%, at least 84%, at least 85%, at least 86%, at least 87%, at least 88%, at least 89%, at least 90%, at least 91%, at least 92%, at least 93%, at least 94%, at least 95%, at least 96%, at least 97%, at least 98%, or at least 99% sequence identity to SEQ ID NO: 1, provided that the amino acid sequence comprises mutations of S128A, L153P, K324I, F333N, 307_322delinsLAKGNNYFGHWHFAVM (SEQ ID NO: 936), 91_100delinsGGGGGKSVDSDGDSYGGGGG (SEQ ID NO: 943), wherein the positions correspond to SEQ ID NO: 1. In some embodiments, the polypeptide having protease activity comprises an amino acid sequence having at least 50%, at least 60%, at least 70%, at least 80%, at least 81%, at least 82%, at least 83%, at least 84%, at least 85%, at least 86%, at least 87%, at least 88%, at least 89%, at least 90%, at least 91%, at least 92%, at least 93%, at least 94%, at least 95%, at least 96%, at least 97%, at least 98%, or at least 99% sequence identity to SEQ ID NO: 1, provided that the amino acid sequence comprises mutations of S128A, L153P, K324I, F333N, 307_322delinsLAKGNNYFGHWHFAVM (SEQ ID NO: 936), 271_287delinsVGISGSAGGIKSVDSDGDSYI (SEQ ID NO: 932), wherein the positions correspond to SEQ ID NO: 1. In some embodiments, the polypeptide having protease activity comprises an amino acid sequence having at least 50%, at least 60%, at least 70%, at least 80%, at least 81%, at least 82%, at least 83%, at least 84%, at least 85%, at least 86%, at least 87%, at least 88%, at least 89%, at least 90%, at least 91%, at least 92%, at least 93%, at least 94%, at least 95%, at least 96%, at least 97%, at least 98%, or at least 99% sequence identity to SEQ ID NO: 1, provided that the amino acid sequence comprises mutations of S128A, L153P, K324I, F333N, 308_324delinsTKSVDSDGDSYKINY (SEQ ID NO: 932), 86_105delinsDDMEAKGNNYFGHWHFAVATN (SEQ ID NO: 941), wherein the positions correspond to SEQ ID NO: 1. In some embodiments, the polypeptide having protease activity comprises an amino acid sequence having at least 50%, at least 60%, at least 70%, at least 80%, at least 81%, at least 82%, at least 83%, at least 84%, at least 85%, at least 86%, at least 87%, at least 88%, at least 89%, at least 90%, at least 91%, at least 92%, at least 93%, at least 94%, at least 95%, at least 96%, at least 97%, at least 98%, or at least 99% sequence identity to SEQ ID NO: 1, provided that the amino acid sequence comprises mutations of M117E, S128A, L153P, F333N, wherein the positions correspond to SEQ ID NO: 1. In some embodiments, the polypeptide having protease activity comprises an amino acid sequence having at least 50%, at least 60%, at least 70%, at least 80%, at least 81%, at least 82%, at least 83%, at least 84%, at least 85%, at least 86%, at least 87%, at least 88%, at least 89%, at least 90%, at least 91%, at least 92%, at least 93%, at least 94%, at least 95%, at least 96%, at least 97%, at least 98%, or at least 99% sequence identity to SEQ ID NO: 1, provided that the amino acid sequence comprises mutations of M117F, S128A, L153P, F333N, wherein the positions correspond to SEQ ID NO: 1. In some embodiments, the polypeptide having protease activity comprises an amino acid sequence having at least 50%, at least 60%, at least 70%, at least 80%, at least 81%, at least 82%, at least 83%, at least 84%, at least 85%, at least 86%, at least 87%, at least 88%, at least 89%, at least 90%, at least 91%, at least 92%, at least 93%, at least 94%, at least 95%, at least 96%, at least 97%, at least 98%, or at least 99% sequence identity to SEQ ID NO: 1, provided that the amino acid sequence comprises mutations of S128A, L153P, F333N, E348R, wherein the positions correspond to SEQ ID NO: 1. In some embodiments, the polypeptide having protease activity comprises an amino acid sequence having at least 50%, at least 60%, at least 70%, at least 80%, at least 81%, at least 82%, at least 83%, at least 84%, at least 85%, at least 86%, at least 87%, at least 88%, at least 89%, at least 90%, at least 91%, at least 92%, at least 93%, at least 94%, at least 95%, at least 96%, at least 97%, at least 98%, or at least 99% sequence identity to SEQ ID NO: 1, provided that the amino acid sequence comprises mutations of S128A, L153P, F333N, E347R, wherein the positions correspond to SEQ ID NO: 1. In some embodiments, the polypeptide having protease activity comprises an amino acid sequence having at least 50%, at least 60%, at least 70%, at least 80%, at least 81%, at least 82%, at least 83%, at least 84%, at least 85%, at least 86%, at least 87%, at least 88%, at least 89%, at least 90%, at least 91%, at least 92%, at least 93%, at least 94%, at least 95%, at least 96%, at least 97%, at least 98%, or at least 99% sequence identity to SEQ ID NO: 1, provided that the amino acid sequence comprises mutations of S128A, L153P, F333N, 1351R, wherein the positions correspond to SEQ ID NO: 1. In some embodiments, the polypeptide having protease activity comprises an amino acid sequence having at least 50%, at least 60%, at least 70%, at least 80%, at least 81%, at least 82%, at least 83%, at least 84%, at least 85%, at least 86%, at least 87%, at least 88%, at least 89%, at least 90%, at least 91%, at least 92%, at least 93%, at least 94%, at least 95%, at least 96%, at least 97%, at least 98%, or at least 99% sequence identity to SEQ ID NO: 1, provided that the amino acid sequence comprises mutations of S128A, L153P, S220Y, F333N, wherein the positions correspond to SEQ ID NO: 1. In some embodiments, the polypeptide having protease activity comprises an amino acid sequence having at least 50%, at least 60%, at least 70%, at least 80%, at least 81%, at least 82%, at least 83%, at least 84%, at least 85%, at least 86%, at least 87%, at least 88%, at least 89%, at least 90%, at least 91%, at least 92%, at least 93%, at least 94%, at least 95%, at least 96%, at least 97%, at least 98%, or at least 99% sequence identity to SEQ ID NO: 1, provided that the amino acid sequence comprises mutations of S128A, L153P, S221Y, F333N, wherein the positions correspond to SEQ ID NO: 1. In some embodiments, the polypeptide having protease activity comprises an amino acid sequence having at least 50%, at least 60%, at least 70%, at least 80%, at least 81%, at least 82%, at least 83%, at least 84%, at least 85%, at least 86%, at least 87%, at least 88%, at least 89%, at least 90%, at least 91%, at least 92%, at least 93%, at least 94%, at least 95%, at least 96%, at least 97%, at least 98%, or at least 99% sequence identity to SEQ ID NO: 1, provided that the amino acid sequence comprises mutations of S128A, L153P, H275Y, F333N, wherein the positions correspond to SEQ ID NO: 1. In some embodiments, the polypeptide having protease activity comprises an amino acid sequence having at least 50%, at least 60%, at least 70%, at least 80%, at least 81%, at least 82%, at least 83%, at least 84%, at least 85%, at least 86%, at least 87%, at least 88%, at least 89%, at least 90%, at least 91%, at least 92%, at least 93%, at least 94%, at least 95%, at least 96%, at least 97%, at least 98%, or at least 99% sequence identity to SEQ ID NO: 1, provided that the amino acid sequence comprises mutations of S128A, L153P, F333N, 200_202NKAdelinsPYLSTKHL (SEQ ID NO: 930), wherein the positions correspond to SEQ ID NO: 1. In some embodiments, the polypeptide having protease activity comprises an amino acid sequence having at least 50%, at least 60%, at least 70%, at least 80%, at least 81%, at least 82%, at least 83%, at least 84%, at least 85%, at least 86%, at least 87%, at least 88%, at least 89%, at least 90%, at least 91%, at least 92%, at least 93%, at least 94%, at least 95%, at least 96%, at least 97%, at least 98%, or at least 99% sequence identity to SEQ ID NO: 1, provided that the amino acid sequence comprises mutations of M117E, S128A, L153P, H222E, F333N, E348R, wherein the positions correspond to SEQ ID NO: 1. In some embodiments, the polypeptide having protease activity comprises an amino acid sequence having at least 50%, at least 60%, at least 70%, at least 80%, at least 81%, at least 82%, at least 83%, at least 84%, at least 85%, at least 86%, at least 87%, at least 88%, at least 89%, at least 90%, at least 91%, at least 92%, at least 93%, at least 94%, at least 95%, at least 96%, at least 97%, at least 98%, or at least 99% sequence identity to SEQ ID NO: 1, provided that the amino acid sequence comprises mutations of C125S, S128A, L153P, K324I, F333N, wherein the positions correspond to SEQ ID NO: 1. In some embodiments, the polypeptide having protease activity comprises an amino acid sequence having at least 50%, at least 60%, at least 70%, at least 80%, at least 81%, at least 82%, at least 83%, at least 84%, at least 85%, at least 86%, at least 87%, at least 88%, at least 89%, at least 90%, at least 91%, at least 92%, at least 93%, at least 94%, at least 95%, at least 96%, at least 97%, at least 98%, or at least 99% sequence identity to SEQ ID NO: 1, provided that the amino acid sequence comprises mutations of C125S, S128A, L153P, R280T, F333N, wherein the positions correspond to SEQ ID NO: 1. In some embodiments, the polypeptide having protease activity comprises an amino acid sequence having at least 50%, at least 60%, at least 70%, at least 80%, at least 81%, at least 82%, at least 83%, at least 84%, at least 85%, at least 86%, at least 87%, at least 88%, at least 89%, at least 90%, at least 91%, at least 92%, at least 93%, at least 94%, at least 95%, at least 96%, at least 97%, at least 98%, or at least 99% sequence identity to SEQ ID NO: 1, provided that the amino acid sequence comprises mutations of C125S, S128A, L153P, N162E, K229E, F333N, wherein the positions correspond to SEQ ID NO: 1. In some embodiments, the polypeptide having protease activity comprises an amino acid sequence having at least 50%, at least 60%, at least 70%, at least 80%, at least 81%, at least 82%, at least 83%, at least 84%, at least 85%, at least 86%, at least 87%, at least 88%, at least 89%, at least 90%, at least 91%, at least 92%, at least 93%, at least 94%, at least 95%, at least 96%, at least 97%, at least 98%, or at least 99% sequence identity to SEQ ID NO: 1, provided that the amino acid sequence comprises mutations of C125S, S128A, L153P, N162E, K229E, K324I, F333N, wherein the positions correspond to SEQ ID NO: 1. In some embodiments, the polypeptide having protease activity comprises an amino acid sequence having at least 50%, at least 60%, at least 70%, at least 80%, at least 81%, at least 82%, at least 83%, at least 84%, at least 85%, at least 86%, at least 87%, at least 88%, at least 89%, at least 90%, at least 91%, at least 92%, at least 93%, at least 94%, at least 95%, at least 96%, at least 97%, at least 98%, or at least 99% sequence identity to SEQ ID NO: 1, provided that the amino acid sequence comprises mutations of C125S, S128A, L153P, N162E, K229E, R280T, K324I, F333N, wherein the positions correspond to SEQ ID NO: 1. In some embodiments, the polypeptide having protease activity comprises an amino acid sequence having at least 50%, at least 60%, at least 70%, at least 80%, at least 81%, at least 82%, at least 83%, at least 84%, at least 85%, at least 86%, at least 87%, at least 88%, at least 89%, at least 90%, at least 91%, at least 92%, at least 93%, at least 94%, at least 95%, at least 96%, at least 97%, at least 98%, or at least 99% sequence identity to SEQ ID NO: 1, provided that the amino acid sequence comprises mutations of S128A, L153P, N162E, K229E, K324I, F333N, 177_183KEYQSNKdelinsESDHG (SEQ ID NOs: 920 and 921), wherein the positions correspond to SEQ ID NO: 1. In some embodiments, the polypeptide having protease activity comprises an amino acid sequence having at least 50%, at least 60%, at least 70%, at least 80%, at least 81%, at least 82%, at least 83%, at least 84%, at least 85%, at least 86%, at least 87%, at least 88%, at least 89%, at least 90%, at least 91%, at least 92%, at least 93%, at least 94%, at least 95%, at least 96%, at least 97%, at least 98%, or at least 99% sequence identity to SEQ ID NO: 1, provided that the amino acid sequence comprises mutations of S128A, L153P, N162E, Q180H, K183D, K229E, K324I, F333N, 176_178YKEdelinsN, wherein the positions correspond to SEQ ID NO: 1. In some embodiments, the polypeptide having protease activity comprises an amino acid sequence having at least 50%, at least 60%, at least 70%, at least 80%, at least 81%, at least 82%, at least 83%, at least 84%, at least 85%, at least 86%, at least 87%, at least 88%, at least 89%, at least 90%, at least 91%, at least 92%, at least 93%, at least 94%, at least 95%, at least 96%, at least 97%, at least 98%, or at least 99% sequence identity to SEQ ID NO: 1, provided that the amino acid sequence comprises mutations of S128A, L153P, N162E, K229E, F313T, S317N, K324I, F333N, 177_319KEYQSNKDRdelinsRDNRDN (SEQ ID NOs: 925 and 919), wherein the positions correspond to SEQ ID NO: 1. In some embodiments, the polypeptide having protease activity comprises an amino acid sequence having at least 50%, at least 60%, at least 70%, at least 80%, at least 81%, at least 82%, at least 83%, at least 84%, at least 85%, at least 86%, at least 87%, at least 88%, at least 89%, at least 90%, at least 91%, at least 92%, at least 93%, at least 94%, at least 95%, at least 96%, at least 97%, at least 98%, or at least 99% sequence identity to SEQ ID NO: 1, provided that the amino acid sequence comprises mutations of S128A, L153P, N162E, K229E, K324I, F333N, 177_319KEYQSNKFNDNSKRdelinsRDNRDNIGDE (SEQ ID NOs: 926 and 927), wherein the positions correspond to SEQ ID NO: 1. In some embodiments, the polypeptide having protease activity comprises an amino acid sequence having at least 50%, at least 60%, at least 70%, at least 80%, at least 81%, at least 82%, at least 83%, at least 84%, at least 85%, at least 86%, at least 87%, at least 88%, at least 89%, at least 90%, at least 91%, at least 92%, at least 93%, at least 94%, at least 95%, at least 96%, at least 97%, at least 98%, or at least 99% sequence identity to SEQ ID NO: 1, provided that the amino acid sequence comprises mutations of S128A, L153P, N162E, K229E, F313I, N314G, K324I, F333N, 177_318KEYQSNKNSKdelinsRDNRDN (SEQ ID NOs: 924 and 919), wherein the positions correspond to SEQ ID NO: 1. In some embodiments, the polypeptide having protease activity comprises an amino acid sequence having at least 50%, at least 60%, at least 70%, at least 80%, at least 81%, at least 82%, at least 83%, at least 84%, at least 85%, at least 86%, at least 87%, at least 88%, at least 89%, at least 90%, at least 91%, at least 92%, at least 93%, at least 94%, at least 95%, at least 96%, at least 97%, at least 98%, or at least 99% sequence identity to SEQ ID NO: 1, provided that the amino acid sequence comprises mutations of S128A, L153P, N162E, K229E, D293G, Q294E, K297R, K324I, F333N, 177_183KEYQSNKdelinsRDNRDN (SEQ ID NOs: 920 and 919), wherein the positions correspond to SEQ ID NO: 1. In some embodiments, the polypeptide having protease activity comprises an amino acid sequence having at least 50%, at least 60%, at least 70%, at least 80%, at least 81%, at least 82%, at least 83%, at least 84%, at least 85%, at least 86%, at least 87%, at least 88%, at least 89%, at least 90%, at least 91%, at least 92%, at least 93%, at least 94%, at least 95%, at least 96%, at least 97%, at least 98%, or at least 99% sequence identity to SEQ ID NO: 1, provided that the amino acid sequence comprises mutations of S128A, L153P, N162E, K229E, Q294E, D295K, K324I, F333N, 177_183KEYQSNKdelinsRDNRDN (SEQ ID NOS: 920 and 919), wherein the positions correspond to SEQ ID NO: 1. In some embodiments, the polypeptide having protease activity comprises an amino acid sequence having at least 50%, at least 60%, at least 70%, at least 80%, at least 81%, at least 82%, at least 83%, at least 84%, at least 85%, at least 86%, at least 87%, at least 88%, at least 89%, at least 90%, at least 91%, at least 92%, at least 93%, at least 94%, at least 95%, at least 96%, at least 97%, at least 98%, or at least 99% sequence identity to SEQ ID NO: 1, provided that the amino acid sequence comprises mutations of S128A, L153P, N162E, K229E, Q294E, D295N, K297N, K324I, F333N, 177_183KEYQSNKdelinsRDNRDN (SEQ ID NOs: 920 and 919), wherein the positions correspond to SEQ ID NO: 1. In some embodiments, the polypeptide having protease activity comprises an amino acid sequence having at least 50%, at least 60%, at least 70%, at least 80%, at least 81%, at least 82%, at least 83%, at least 84%, at least 85%, at least 86%, at least 87%, at least 88%, at least 89%, at least 90%, at least 91%, at least 92%, at least 93%, at least 94%, at least 95%, at least 96%, at least 97%, at least 98%, or at least 99% sequence identity to SEQ ID NO: 1, provided that the amino acid sequence comprises mutations of S128A, L153P, N162E, K229E, K324I, F333N, 177_185KEYQSNKYAdelinsESPNT (SEQ ID NOs: 922 and 923), wherein the positions correspond to SEQ ID NO: 1. In some embodiments, the polypeptide having protease activity comprises an amino acid sequence having at least 50%, at least 60%, at least 70%, at least 80%, at least 81%, at least 82%, at least 83%, at least 84%, at least 85%, at least 86%, at least 87%, at least 88%, at least 89%, at least 90%, at least 91%, at least 92%, at least 93%, at least 94%, at least 95%, at least 96%, at least 97%, at least 98%, or at least 99% sequence identity to SEQ ID NO: 1, provided that the amino acid sequence comprises mutations of S128A, L153P, N162E, K229E, K324I, F333N, 180_185QSNKYAdelinsSG (SEQ ID NO: 929), wherein the positions correspond to SEQ ID NO: 1. In some embodiments, the polypeptide having protease activity comprises an amino acid sequence having at least 50%, at least 60%, at least 70%, at least 80%, at least 81%, at least 82%, at least 83%, at least 84%, at least 85%, at least 86%, at least 87%, at least 88%, at least 89%, at least 90%, at least 91%, at least 92%, at least 93%, at least 94%, at least 95%, at least 96%, at least 97%, at least 98%, or at least 99% sequence identity to SEQ ID NO: 1, provided that the amino acid sequence comprises mutations of S128A, L153P, N162E, K229E, K318G, K324I, F333N, 177_317KEYQSNKNDNSdelinsRDNRDN (SEQ ID NOs: 928 and 919), wherein the positions correspond to SEQ ID NO: 1. In some embodiments, the polypeptide having protease activity comprises an amino acid sequence having at least 50%, at least 60%, at least 70%, at least 80%, at least 81%, at least 82%, at least 83%, at least 84%, at least 85%, at least 86%, at least 87%, at least 88%, at least 89%, at least 90%, at least 91%, at least 92%, at least 93%, at least 94%, at least 95%, at least 96%, at least 97%, at least 98%, or at least 99% sequence identity to SEQ ID NO: 1, provided that the amino acid sequence comprises mutations of S128A, L153P, N162E, K229E, K324I, F333N, 177_317KEYQSNKNDNSdelinsRDNRDN (SEQ ID NOs: 928 and 919), wherein the positions correspond to SEQ ID NO: 1. In some embodiments, the polypeptide having protease activity comprises an amino acid sequence having at least 50%, at least 60%, at least 70%, at least 80%, at least 81%, at least 82%, at least 83%, at least 84%, at least 85%, at least 86%, at least 87%, at least 88%, at least 89%, at least 90%, at least 91%, at least 92%, at least 93%, at least 94%, at least 95%, at least 96%, at least 97%, at least 98%, or at least 99% sequence identity to SEQ ID NO: 1, provided that the amino acid sequence comprises mutations of S128A, L153P, G199P, K324I, F333N, wherein the positions correspond to SEQ ID NO: 1. In some embodiments, the polypeptide having protease activity comprises an amino acid sequence having at least 50%, at least 60%, at least 70%, at least 80%, at least 81%, at least 82%, at least 83%, at least 84%, at least 85%, at least 86%, at least 87%, at least 88%, at least 89%, at least 90%, at least 91%, at least 92%, at least 93%, at least 94%, at least 95%, at least 96%, at least 97%, at least 98%, or at least 99% sequence identity to SEQ ID NO: 1, provided that the amino acid sequence comprises mutations of S128A, L153P, H174E, K324I, F333N, wherein the positions correspond to SEQ ID NO: 1. In some embodiments, the polypeptide having protease activity comprises an amino acid sequence having at least 50%, at least 60%, at least 70%, at least 80%, at least 81%, at least 82%, at least 83%, at least 84%, at least 85%, at least 86%, at least 87%, at least 88%, at least 89%, at least 90%, at least 91%, at least 92%, at least 93%, at least 94%, at least 95%, at least 96%, at least 97%, at least 98%, or at least 99% sequence identity to SEQ ID NO: 1, provided that the amino acid sequence comprises mutations of S128A, L153P, I262K, K324I, F333N, wherein the positions correspond to SEQ ID NO: 1. In some embodiments, the polypeptide having protease activity comprises an amino acid sequence having at least 50%, at least 60%, at least 70%, at least 80%, at least 81%, at least 82%, at least 83%, at least 84%, at least 85%, at least 86%, at least 87%, at least 88%, at least 89%, at least 90%, at least 91%, at least 92%, at least 93%, at least 94%, at least 95%, at least 96%, at least 97%, at least 98%, or at least 99% sequence identity to SEQ ID NO: 1, provided that the amino acid sequence comprises mutations of S128A, L153P, K324I, F333N, 1336A, wherein the positions correspond to SEQ ID NO: 1. In some embodiments, the polypeptide having protease activity comprises an amino acid sequence having at least 50%, at least 60%, at least 70%, at least 80%, at least 81%, at least 82%, at least 83%, at least 84%, at least 85%, at least 86%, at least 87%, at least 88%, at least 89%, at least 90%, at least 91%, at least 92%, at least 93%, at least 94%, at least 95%, at least 96%, at least 97%, at least 98%, or at least 99% sequence identity to SEQ ID NO: 1, provided that the amino acid sequence comprises mutations of K116D, S128A, L153P, K324I, F333N, wherein the positions correspond to SEQ ID NO: 1. In some embodiments, the polypeptide having protease activity comprises an amino acid sequence having at least 50%, at least 60%, at least 70%, at least 80%, at least 81%, at least 82%, at least 83%, at least 84%, at least 85%, at least 86%, at least 87%, at least 88%, at least 89%, at least 90%, at least 91%, at least 92%, at least 93%, at least 94%, at least 95%, at least 96%, at least 97%, at least 98%, or at least 99% sequence identity to SEQ ID NO: 1, provided that the amino acid sequence comprises mutations of S128A, K149L, L153P, K324I, F333N, wherein the positions correspond to SEQ ID NO: 1. In some embodiments, the polypeptide having protease activity comprises an amino acid sequence having at least 50%, at least 60%, at least 70%, at least 80%, at least 81%, at least 82%, at least 83%, at least 84%, at least 85%, at least 86%, at least 87%, at least 88%, at least 89%, at least 90%, at least 91%, at least 92%, at least 93%, at least 94%, at least 95%, at least 96%, at least 97%, at least 98%, or at least 99% sequence identity to SEQ ID NO: 1, provided that the amino acid sequence comprises mutations of S128A, L153P, N182D, K324I, F333N, wherein the positions correspond to SEQ ID NO: 1. In some embodiments, the polypeptide having protease activity comprises an amino acid sequence having at least 50%, at least 60%, at least 70%, at least 80%, at least 81%, at least 82%, at least 83%, at least 84%, at least 85%, at least 86%, at least 87%, at least 88%, at least 89%, at least 90%, at least 91%, at least 92%, at least 93%, at least 94%, at least 95%, at least 96%, at least 97%, at least 98%, or at least 99% sequence identity to SEQ ID NO: 1, provided that the amino acid sequence comprises mutations of S94E, S128A, L153P, K324I, F333N, wherein the positions correspond to SEQ ID NO: 1. In some embodiments, the polypeptide having protease activity comprises an amino acid sequence having at least 50%, at least 60%, at least 70%, at least 80%, at least 81%, at least 82%, at least 83%, at least 84%, at least 85%, at least 86%, at least 87%, at least 88%, at least 89%, at least 90%, at least 91%, at least 92%, at least 93%, at least 94%, at least 95%, at least 96%, at least 97%, at least 98%, or at least 99% sequence identity to SEQ ID NO: 1, provided that the amino acid sequence comprises mutations of S128A, L153P, T276G, K324I, F333N, wherein the positions correspond to SEQ ID NO: 1. In some embodiments, the polypeptide having protease activity comprises an amino acid sequence having at least 50%, at least 60%, at least 70%, at least 80%, at least 81%, at least 82%, at least 83%, at least 84%, at least 85%, at least 86%, at least 87%, at least 88%, at least 89%, at least 90%, at least 91%, at least 92%, at least 93%, at least 94%, at least 95%, at least 96%, at least 97%, at least 98%, or at least 99% sequence identity to SEQ ID NO: 1, provided that the amino acid sequence comprises mutations of S128A, L153P, V270P, K324I, F333N, wherein the positions correspond to SEQ ID NO: 1. In some embodiments, the polypeptide having protease activity comprises an amino acid sequence having at least 50%, at least 60%, at least 70%, at least 80%, at least 81%, at least 82%, at least 83%, at least 84%, at least 85%, at least 86%, at least 87%, at least 88%, at least 89%, at least 90%, at least 91%, at least 92%, at least 93%, at least 94%, at least 95%, at least 96%, at least 97%, at least 98%, or at least 99% sequence identity to SEQ ID NO: 1, provided that the amino acid sequence comprises mutations of S128A, L153P, V274G, K324I, F333N, wherein the positions correspond to SEQ ID NO: 1. In some embodiments, the polypeptide having protease activity comprises an amino acid sequence having at least 50%, at least 60%, at least 70%, at least 80%, at least 81%, at least 82%, at least 83%, at least 84%, at least 85%, at least 86%, at least 87%, at least 88%, at least 89%, at least 90%, at least 91%, at least 92%, at least 93%, at least 94%, at least 95%, at least 96%, at least 97%, at least 98%, or at least 99% sequence identity to SEQ ID NO: 1, provided that the amino acid sequence comprises mutations of S128A, L153P, V303I, K324I, F333N, wherein the positions correspond to SEQ ID NO: 1. In some embodiments, the polypeptide having protease activity comprises an amino acid sequence having at least 50%, at least 60%, at least 70%, at least 80%, at least 81%, at least 82%, at least 83%, at least 84%, at least 85%, at least 86%, at least 87%, at least 88%, at least 89%, at least 90%, at least 91%, at least 92%, at least 93%, at least 94%, at least 95%, at least 96%, at least 97%, at least 98%, or at least 99% sequence identity to SEQ ID NO: 1, provided that the amino acid sequence comprises mutations of S128A, L153P, K324I, F333N, V364E, wherein the positions correspond to SEQ ID NO: 1. In some embodiments, the polypeptide having protease activity comprises an amino acid sequence having at least 50%, at least 60%, at least 70%, at least 80%, at least 81%, at least 82%, at least 83%, at least 84%, at least 85%, at least 86%, at least 87%, at least 88%, at least 89%, at least 90%, at least 91%, at least 92%, at least 93%, at least 94%, at least 95%, at least 96%, at least 97%, at least 98%, or at least 99% sequence identity to SEQ ID NO: 1, provided that the amino acid sequence comprises mutations of S128A, L153P, Y224T, K324I, F333N, wherein the positions correspond to SEQ ID NO: 1. In some embodiments, the polypeptide having protease activity comprises an amino acid sequence having at least 50%, at least 60%, at least 70%, at least 80%, at least 81%, at least 82%, at least 83%, at least 84%, at least 85%, at least 86%, at least 87%, at least 88%, at least 89%, at least 90%, at least 91%, at least 92%, at least 93%, at least 94%, at least 95%, at least 96%, at least 97%, at least 98%, or at least 99% sequence identity to SEQ ID NO: 1, provided that the amino acid sequence comprises mutations of S128A, L153P, Y281T, K324I, F333N, wherein the positions correspond to SEQ ID NO: 1. In some embodiments, the polypeptide having protease activity comprises an amino acid sequence having at least 50%, at least 60%, at least 70%, at least 80%, at least 81%, at least 82%, at least 83%, at least 84%, at least 85%, at least 86%, at least 87%, at least 88%, at least 89%, at least 90%, at least 91%, at least 92%, at least 93%, at least 94%, at least 95%, at least 96%, at least 97%, at least 98%, or at least 99% sequence identity to SEQ ID NO: 1, provided that the amino acid sequence comprises mutations of I84P, S128A, L153P, K324I, F333N, wherein the positions correspond to SEQ ID NO: 1. In some embodiments, the polypeptide having protease activity comprises an amino acid sequence having at least 50%, at least 60%, at least 70%, at least 80%, at least 81%, at least 82%, at least 83%, at least 84%, at least 85%, at least 86%, at least 87%, at least 88%, at least 89%, at least 90%, at least 91%, at least 92%, at least 93%, at least 94%, at least 95%, at least 96%, at least 97%, at least 98%, or at least 99% sequence identity to SEQ ID NO: 1, provided that the amino acid sequence comprises mutations of I84G, S128A, L153P, K324I, F333N, wherein the positions correspond to SEQ ID NO: 1. In some embodiments, the polypeptide having protease activity comprises an amino acid sequence having at least 50%, at least 60%, at least 70%, at least 80%, at least 81%, at least 82%, at least 83%, at least 84%, at least 85%, at least 86%, at least 87%, at least 88%, at least 89%, at least 90%, at least 91%, at least 92%, at least 93%, at least 94%, at least 95%, at least 96%, at least 97%, at least 98%, or at least 99% sequence identity to SEQ ID NO: 1, provided that the amino acid sequence comprises mutations of V102L, S128A, L153P, K324I, F333N, wherein the positions correspond to SEQ ID NO: 1. In some embodiments, the polypeptide having protease activity comprises an amino acid sequence having at least 50%, at least 60%, at least 70%, at least 80%, at least 81%, at least 82%, at least 83%, at least 84%, at least 85%, at least 86%, at least 87%, at least 88%, at least 89%, at least 90%, at least 91%, at least 92%, at least 93%, at least 94%, at least 95%, at least 96%, at least 97%, at least 98%, or at least 99% sequence identity to SEQ ID NO: 1, provided that the amino acid sequence comprises mutations of S128A, L153P, A185T, K324I, F333N, wherein the positions correspond to SEQ ID NO: 1. In some embodiments, the polypeptide having protease activity comprises an amino acid sequence having at least 50%, at least 60%, at least 70%, at least 80%, at least 81%, at least 82%, at least 83%, at least 84%, at least 85%, at least 86%, at least 87%, at least 88%, at least 89%, at least 90%, at least 91%, at least 92%, at least 93%, at least 94%, at least 95%, at least 96%, at least 97%, at least 98%, or at least 99% sequence identity to SEQ ID NO: 1, provided that the amino acid sequence comprises mutations of S128A, L153P, N182P, K324I, F333N, wherein the positions correspond to SEQ ID NO: 1. In some embodiments, the polypeptide having protease activity comprises an amino acid sequence having at least 50%, at least 60%, at least 70%, at least 80%, at least 81%, at least 82%, at least 83%, at least 84%, at least 85%, at least 86%, at least 87%, at least 88%, at least 89%, at least 90%, at least 91%, at least 92%, at least 93%, at least 94%, at least 95%, at least 96%, at least 97%, at least 98%, or at least 99% sequence identity to SEQ ID NO: 1, provided that the amino acid sequence comprises mutations of S128A, L153P, N242G, K324I, F333N, wherein the positions correspond to SEQ ID NO: 1. In some embodiments, the polypeptide having protease activity comprises an amino acid sequence having at least 50%, at least 60%, at least 70%, at least 80%, at least 81%, at least 82%, at least 83%, at least 84%, at least 85%, at least 86%, at least 87%, at least 88%, at least 89%, at least 90%, at least 91%, at least 92%, at least 93%, at least 94%, at least 95%, at least 96%, at least 97%, at least 98%, or at least 99% sequence identity to SEQ ID NO: 1, provided that the amino acid sequence comprises mutations of S128A, L153P, I301L, K324I, F333N, wherein the positions correspond to SEQ ID NO: 1. In some embodiments, the polypeptide having protease activity comprises an amino acid sequence having at least 50%, at least 60%, at least 70%, at least 80%, at least 81%, at least 82%, at least 83%, at least 84%, at least 85%, at least 86%, at least 87%, at least 88%, at least 89%, at least 90%, at least 91%, at least 92%, at least 93%, at least 94%, at least 95%, at least 96%, at least 97%, at least 98%, or at least 99% sequence identity to SEQ ID NO: 1, provided that the amino acid sequence comprises mutations of S128A, L153P, V303Y, K324I, F333N, wherein the positions correspond to SEQ ID NO: 1. In some embodiments, the polypeptide having protease activity comprises an amino acid sequence having at least 50%, at least 60%, at least 70%, at least 80%, at least 81%, at least 82%, at least 83%, at least 84%, at least 85%, at least 86%, at least 87%, at least 88%, at least 89%, at least 90%, at least 91%, at least 92%, at least 93%, at least 94%, at least 95%, at least 96%, at least 97%, at least 98%, or at least 99% sequence identity to SEQ ID NO: 1, provided that the amino acid sequence comprises mutations of S128A, L153P, E310D, K324I, F333N, wherein the positions correspond to SEQ ID NO: 1. In some embodiments, the polypeptide having protease activity comprises an amino acid sequence having at least 50%, at least 60%, at least 70%, at least 80%, at least 81%, at least 82%, at least 83%, at least 84%, at least 85%, at least 86%, at least 87%, at least 88%, at least 89%, at least 90%, at least 91%, at least 92%, at least 93%, at least 94%, at least 95%, at least 96%, at least 97%, at least 98%, or at least 99% sequence identity to SEQ ID NO: 1, provided that the amino acid sequence comprises mutations of S128A, L153P, H174D, K324I, F333N, wherein the positions correspond to SEQ ID NO: 1. In some embodiments, the polypeptide having protease activity comprises an amino acid sequence having at least 50%, at least 60%, at least 70%, at least 80%, at least 81%, at least 82%, at least 83%, at least 84%, at least 85%, at least 86%, at least 87%, at least 88%, at least 89%, at least 90%, at least 91%, at least 92%, at least 93%, at least 94%, at least 95%, at least 96%, at least 97%, at least 98%, or at least 99% sequence identity to SEQ ID NO: 1, provided that the amino acid sequence comprises mutations of S128A, L153P, N173K, K324I, F333N, wherein the positions correspond to SEQ ID NO: 1. In some embodiments, the polypeptide having protease activity comprises an amino acid sequence having at least 50%, at least 60%, at least 70%, at least 80%, at least 81%, at least 82%, at least 83%, at least 84%, at least 85%, at least 86%, at least 87%, at least 88%, at least 89%, at least 90%, at least 91%, at least 92%, at least 93%, at least 94%, at least 95%, at least 96%, at least 97%, at least 98%, or at least 99% sequence identity to SEQ ID NO: 1, provided that the amino acid sequence comprises mutations of S128A, L153P, K196Q, K324I, F333N, wherein the positions correspond to SEQ ID NO: 1. In some embodiments, the polypeptide having protease activity comprises an amino acid sequence having at least 50%, at least 60%, at least 70%, at least 80%, at least 81%, at least 82%, at least 83%, at least 84%, at least 85%, at least 86%, at least 87%, at least 88%, at least 89%, at least 90%, at least 91%, at least 92%, at least 93%, at least 94%, at least 95%, at least 96%, at least 97%, at least 98%, or at least 99% sequence identity to SEQ ID NO: 1, provided that the amino acid sequence comprises mutations of S128A, L153P, K196L, K324I, F333N, wherein the positions correspond to SEQ ID NO: 1. In some embodiments, the polypeptide having protease activity comprises an amino acid sequence having at least 50%, at least 60%, at least 70%, at least 80%, at least 81%, at least 82%, at least 83%, at least 84%, at least 85%, at least 86%, at least 87%, at least 88%, at least 89%, at least 90%, at least 91%, at least 92%, at least 93%, at least 94%, at least 95%, at least 96%, at least 97%, at least 98%, or at least 99% sequence identity to SEQ ID NO: 1, provided that the amino acid sequence comprises mutations of S128A, L153P, K195L, K324I, F333N, wherein the positions correspond to SEQ ID NO: 1. In some embodiments, the polypeptide having protease activity comprises an amino acid sequence having at least 50%, at least 60%, at least 70%, at least 80%, at least 81%, at least 82%, at least 83%, at least 84%, at least 85%, at least 86%, at least 87%, at least 88%, at least 89%, at least 90%, at least 91%, at least 92%, at least 93%, at least 94%, at least 95%, at least 96%, at least 97%, at least 98%, or at least 99% sequence identity to SEQ ID NO: 1, provided that the amino acid sequence comprises mutations of S128A, L153P, K195R, K324I, F333N, wherein the positions correspond to SEQ ID NO: 1. In some embodiments, the polypeptide having protease activity comprises an amino acid sequence having at least 50%, at least 60%, at least 70%, at least 80%, at least 81%, at least 82%, at least 83%, at least 84%, at least 85%, at least 86%, at least 87%, at least 88%, at least 89%, at least 90%, at least 91%, at least 92%, at least 93%, at least 94%, at least 95%, at least 96%, at least 97%, at least 98%, or at least 99% sequence identity to SEQ ID NO: 1, provided that the amino acid sequence comprises mutations of S128A, L153P, H197R, K324I, F333N, wherein the positions correspond to SEQ ID NO: 1. In some embodiments, the polypeptide having protease activity comprises an amino acid sequence having at least 50%, at least 60%, at least 70%, at least 80%, at least 81%, at least 82%, at least 83%, at least 84%, at least 85%, at least 86%, at least 87%, at least 88%, at least 89%, at least 90%, at least 91%, at least 92%, at least 93%, at least 94%, at least 95%, at least 96%, at least 97%, at least 98%, or at least 99% sequence identity to SEQ ID NO: 1, provided that the amino acid sequence comprises mutations of S128A, L153P, H197K, K324I, F333N, wherein the positions correspond to SEQ ID NO: 1. In some embodiments, the polypeptide having protease activity comprises an amino acid sequence having at least 50%, at least 60%, at least 70%, at least 80%, at least 81%, at least 82%, at least 83%, at least 84%, at least 85%, at least 86%, at least 87%, at least 88%, at least 89%, at least 90%, at least 91%, at least 92%, at least 93%, at least 94%, at least 95%, at least 96%, at least 97%, at least 98%, or at least 99% sequence identity to SEQ ID NO: 1, provided that the amino acid sequence comprises mutations of S128A, L153P, H197D, K324I, F333N, wherein the positions correspond to SEQ ID NO: 1. In some embodiments, the polypeptide having protease activity comprises an amino acid sequence having at least 50%, at least 60%, at least 70%, at least 80%, at least 81%, at least 82%, at least 83%, at least 84%, at least 85%, at least 86%, at least 87%, at least 88%, at least 89%, at least 90%, at least 91%, at least 92%, at least 93%, at least 94%, at least 95%, at least 96%, at least 97%, at least 98%, or at least 99% sequence identity to SEQ ID NO: 1, provided that the amino acid sequence comprises mutations of S128A, L153P, N263D, K324I, F333N, wherein the positions correspond to SEQ ID NO: 1. In some embodiments, the polypeptide having protease activity comprises an amino acid sequence having at least 50%, at least 60%, at least 70%, at least 80%, at least 81%, at least 82%, at least 83%, at least 84%, at least 85%, at least 86%, at least 87%, at least 88%, at least 89%, at least 90%, at least 91%, at least 92%, at least 93%, at least 94%, at least 95%, at least 96%, at least 97%, at least 98%, or at least 99% sequence identity to SEQ ID NO: 1, provided that the amino acid sequence comprises mutations of S128A, L153P, H268G, K324I, F333N, wherein the positions correspond to SEQ ID NO: 1. In some embodiments, the polypeptide having protease activity comprises an amino acid sequence having at least 50%, at least 60%, at least 70%, at least 80%, at least 81%, at least 82%, at least 83%, at least 84%, at least 85%, at least 86%, at least 87%, at least 88%, at least 89%, at least 90%, at least 91%, at least 92%, at least 93%, at least 94%, at least 95%, at least 96%, at least 97%, at least 98%, or at least 99% sequence identity to SEQ ID NO: 1, provided that the amino acid sequence comprises mutations of S128A, L153P, H268R, K324I, F333N, wherein the positions correspond to SEQ ID NO: 1. In some embodiments, the polypeptide having protease activity comprises an amino acid sequence having at least 50%, at least 60%, at least 70%, at least 80%, at least 81%, at least 82%, at least 83%, at least 84%, at least 85%, at least 86%, at least 87%, at least 88%, at least 89%, at least 90%, at least 91%, at least 92%, at least 93%, at least 94%, at least 95%, at least 96%, at least 97%, at least 98%, or at least 99% sequence identity to SEQ ID NO: 1, provided that the amino acid sequence comprises mutations of S128A, L153P, H268S, K324I, F333N, wherein the positions correspond to SEQ ID NO: 1. In some embodiments, the polypeptide having protease activity comprises an amino acid sequence having at least 50%, at least 60%, at least 70%, at least 80%, at least 81%, at least 82%, at least 83%, at least 84%, at least 85%, at least 86%, at least 87%, at least 88%, at least 89%, at least 90%, at least 91%, at least 92%, at least 93%, at least 94%, at least 95%, at least 96%, at least 97%, at least 98%, or at least 99% sequence identity to SEQ ID NO: 1, provided that the amino acid sequence comprises mutations of S128A, L153P, T276R, K324I, F333N, wherein the positions correspond to SEQ ID NO: 1. In some embodiments, the polypeptide having protease activity comprises an amino acid sequence having at least 50%, at least 60%, at least 70%, at least 80%, at least 81%, at least 82%, at least 83%, at least 84%, at least 85%, at least 86%, at least 87%, at least 88%, at least 89%, at least 90%, at least 91%, at least 92%, at least 93%, at least 94%, at least 95%, at least 96%, at least 97%, at least 98%, or at least 99% sequence identity to SEQ ID NO: 1, provided that the amino acid sequence comprises mutations of S128A, L153P, H275L, K324I, F333N, wherein the positions correspond to SEQ ID NO: 1. In some embodiments, the polypeptide having protease activity comprises an amino acid sequence having at least 50%, at least 60%, at least 70%, at least 80%, at least 81%, at least 82%, at least 83%, at least 84%, at least 85%, at least 86%, at least 87%, at least 88%, at least 89%, at least 90%, at least 91%, at least 92%, at least 93%, at least 94%, at least 95%, at least 96%, at least 97%, at least 98%, or at least 99% sequence identity to SEQ ID NO: 1, provided that the amino acid sequence comprises mutations of S128A, L153P, L279G, K324I, F333N, wherein the positions correspond to SEQ ID NO: 1. In some embodiments, the polypeptide having protease activity comprises an amino acid sequence having at least 50%, at least 60%, at least 70%, at least 80%, at least 81%, at least 82%, at least 83%, at least 84%, at least 85%, at least 86%, at least 87%, at least 88%, at least 89%, at least 90%, at least 91%, at least 92%, at least 93%, at least 94%, at least 95%, at least 96%, at least 97%, at least 98%, or at least 99% sequence identity to SEQ ID NO: 1, provided that the amino acid sequence comprises mutations of S128A, L153P, L279T, K324I, F333N, wherein the positions correspond to SEQ ID NO: 1. In some embodiments, the polypeptide having protease activity comprises an amino acid sequence having at least 50%, at least 60%, at least 70%, at least 80%, at least 81%, at least 82%, at least 83%, at least 84%, at least 85%, at least 86%, at least 87%, at least 88%, at least 89%, at least 90%, at least 91%, at least 92%, at least 93%, at least 94%, at least 95%, at least 96%, at least 97%, at least 98%, or at least 99% sequence identity to SEQ ID NO: 1, provided that the amino acid sequence comprises mutations of S128A, L153P, Y281H, K324I, F333N, wherein the positions correspond to SEQ ID NO: 1. In some embodiments, the polypeptide having protease activity comprises an amino acid sequence having at least 50%, at least 60%, at least 70%, at least 80%, at least 81%, at least 82%, at least 83%, at least 84%, at least 85%, at least 86%, at least 87%, at least 88%, at least 89%, at least 90%, at least 91%, at least 92%, at least 93%, at least 94%, at least 95%, at least 96%, at least 97%, at least 98%, or at least 99% sequence identity to SEQ ID NO: 1, provided that the amino acid sequence comprises mutations of S128A, L153P, Y281S, K324I, F333N, wherein the positions correspond to SEQ ID NO: 1. In some embodiments, the polypeptide having protease activity comprises an amino acid sequence having at least 50%, at least 60%, at least 70%, at least 80%, at least 81%, at least 82%, at least 83%, at least 84%, at least 85%, at least 86%, at least 87%, at least 88%, at least 89%, at least 90%, at least 91%, at least 92%, at least 93%, at least 94%, at least 95%, at least 96%, at least 97%, at least 98%, or at least 99% sequence identity to SEQ ID NO: 1, provided that the amino acid sequence comprises mutations of S128A, L153P, R282G, K324I, F333N, wherein the positions correspond to SEQ ID NO: 1. In some embodiments, the polypeptide having protease activity comprises an amino acid sequence having at least 50%, at least 60%, at least 70%, at least 80%, at least 81%, at least 82%, at least 83%, at least 84%, at least 85%, at least 86%, at least 87%, at least 88%, at least 89%, at least 90%, at least 91%, at least 92%, at least 93%, at least 94%, at least 95%, at least 96%, at least 97%, at least 98%, or at least 99% sequence identity to SEQ ID NO: 1, provided that the amino acid sequence comprises mutations of S128A, L153P, R282N, K324I, F333N, wherein the positions correspond to SEQ ID NO: 1. In some embodiments, the polypeptide having protease activity comprises an amino acid sequence having at least 50%, at least 60%, at least 70%, at least 80%, at least 81%, at least 82%, at least 83%, at least 84%, at least 85%, at least 86%, at least 87%, at least 88%, at least 89%, at least 90%, at least 91%, at least 92%, at least 93%, at least 94%, at least 95%, at least 96%, at least 97%, at least 98%, or at least 99% sequence identity to SEQ ID NO: 1, provided that the amino acid sequence comprises mutations of S128A, L153P, K324I, F333D, wherein the positions correspond to SEQ ID NO: 1. In some embodiments, the polypeptide having protease activity comprises an amino acid sequence having at least 50%, at least 60%, at least 70%, at least 80%, at least 81%, at least 82%, at least 83%, at least 84%, at least 85%, at least 86%, at least 87%, at least 88%, at least 89%, at least 90%, at least 91%, at least 92%, at least 93%, at least 94%, at least 95%, at least 96%, at least 97%, at least 98%, or at least 99% sequence identity to SEQ ID NO: 1, provided that the amino acid sequence comprises mutations of S128A, L153P, K324I, L329K, F333N, wherein the positions correspond to SEQ ID NO: 1. In some embodiments, the polypeptide having protease activity comprises an amino acid sequence having at least 50%, at least 60%, at least 70%, at least 80%, at least 81%, at least 82%, at least 83%, at least 84%, at least 85%, at least 86%, at least 87%, at least 88%, at least 89%, at least 90%, at least 91%, at least 92%, at least 93%, at least 94%, at least 95%, at least 96%, at least 97%, at least 98%, or at least 99% sequence identity to SEQ ID NO: 1, provided that the amino acid sequence comprises mutations of S128A, L153P, K324I, L329R, F333N, wherein the positions correspond to SEQ ID NO: 1. In some embodiments, the polypeptide having protease activity comprises an amino acid sequence having at least 50%, at least 60%, at least 70%, at least 80%, at least 81%, at least 82%, at least 83%, at least 84%, at least 85%, at least 86%, at least 87%, at least 88%, at least 89%, at least 90%, at least 91%, at least 92%, at least 93%, at least 94%, at least 95%, at least 96%, at least 97%, at least 98%, or at least 99% sequence identity to SEQ ID NO: 1, provided that the amino acid sequence comprises mutations of S128A, L153P, L279W, K324I, F333N, wherein the positions correspond to SEQ ID NO: 1. In some embodiments, the polypeptide having protease activity comprises an amino acid sequence having at least 50%, at least 60%, at least 70%, at least 80%, at least 81%, at least 82%, at least 83%, at least 84%, at least 85%, at least 86%, at least 87%, at least 88%, at least 89%, at least 90%, at least 91%, at least 92%, at least 93%, at least 94%, at least 95%, at least 96%, at least 97%, at least 98%, or at least 99% sequence identity to SEQ ID NO: 1, provided that the amino acid sequence comprises mutations of S128A, L153P, L279Y, K324I, F333N, wherein the positions correspond to SEQ ID NO: 1. In some embodiments, the polypeptide having protease activity comprises an amino acid sequence having at least 50%, at least 60%, at least 70%, at least 80%, at least 81%, at least 82%, at least 83%, at least 84%, at least 85%, at least 86%, at least 87%, at least 88%, at least 89%, at least 90%, at least 91%, at least 92%, at least 93%, at least 94%, at least 95%, at least 96%, at least 97%, at least 98%, or at least 99% sequence identity to SEQ ID NO: 1, provided that the amino acid sequence comprises mutations of D71E, S128A, L153P, R189K, K324I, A343Y, wherein the positions correspond to SEQ ID NO: 1. In some embodiments, the polypeptide having protease activity comprises an amino acid sequence having at least 50%, at least 60%, at least 70%, at least 80%, at least 81%, at least 82%, at least 83%, at least 84%, at least 85%, at least 86%, at least 87%, at least 88%, at least 89%, at least 90%, at least 91%, at least 92%, at least 93%, at least 94%, at least 95%, at least 96%, at least 97%, at least 98%, or at least 99% sequence identity to SEQ ID NO: 1, provided that the amino acid sequence comprises mutations of D71E, S94D, S128A, E143D, L153P, R189K, Q294E, K324I, F333N, A343Y, wherein the positions correspond to SEQ ID NO: 1. In some embodiments, the polypeptide having protease activity comprises an amino acid sequence having at least 50%, at least 60%, at least 70%, at least 80%, at least 81%, at least 82%, at least 83%, at least 84%, at least 85%, at least 86%, at least 87%, at least 88%, at least 89%, at least 90%, at least 91%, at least 92%, at least 93%, at least 94%, at least 95%, at least 96%, at least 97%, at least 98%, or at least 99% sequence identity to SEQ ID NO: 1, provided that the amino acid sequence comprises mutations of D71E, I84V, S94D, S128A, E143D, L153P, R189K, N242G, Q294E, K324I, F333N, A343Y, wherein the positions correspond to SEQ ID NO: 1. In some embodiments, the polypeptide having protease activity comprises an amino acid sequence having at least 50%, at least 60%, at least 70%, at least 80%, at least 81%, at least 82%, at least 83%, at least 84%, at least 85%, at least 86%, at least 87%, at least 88%, at least 89%, at least 90%, at least 91%, at least 92%, at least 93%, at least 94%, at least 95%, at least 96%, at least 97%, at least 98%, or at least 99% sequence identity to SEQ ID NO: 1, provided that the amino acid sequence comprises mutations of D71E, I84V, E86D, H91K, S94D, S128A, E143D, L153P, S181D, R189K, N228K, N242G, N243K, K244L, G256D, Q294E, K324I, F333N, A343Y, wherein the positions correspond to SEQ ID NO: 1. In some embodiments, the polypeptide having protease activity comprises an amino acid sequence having at least 50%, at least 60%, at least 70%, at least 80%, at least 81%, at least 82%, at least 83%, at least 84%, at least 85%, at least 86%, at least 87%, at least 88%, at least 89%, at least 90%, at least 91%, at least 92%, at least 93%, at least 94%, at least 95%, at least 96%, at least 97%, at least 98%, or at least 99% sequence identity to SEQ ID NO: 1, provided that the amino acid sequence comprises mutations of S128A, L153P, N260A, K324I, F333N, K346P, E347N, E374P, wherein the positions correspond to SEQ ID NO: 1. In some embodiments, the polypeptide having protease activity comprises an amino acid sequence having at least 50%, at least 60%, at least 70%, at least 80%, at least 81%, at least 82%, at least 83%, at least 84%, at least 85%, at least 86%, at least 87%, at least 88%, at least 89%, at least 90%, at least 91%, at least 92%, at least 93%, at least 94%, at least 95%, at least 96%, at least 97%, at least 98%, or at least 99% sequence identity to SEQ ID NO: 1, provided that the amino acid sequence comprises mutations of S128A, L153P, V164K, N260A, K324I, F333N, K346P, E347N, E374P, wherein the positions correspond to SEQ ID NO: 1. In some embodiments, the polypeptide having protease activity comprises an amino acid sequence having at least 50%, at least 60%, at least 70%, at least 80%, at least 81%, at least 82%, at least 83%, at least 84%, at least 85%, at least 86%, at least 87%, at least 88%, at least 89%, at least 90%, at least 91%, at least 92%, at least 93%, at least 94%, at least 95%, at least 96%, at least 97%, at least 98%, or at least 99% sequence identity to SEQ ID NO: 1, provided that the amino acid sequence comprises mutations of S128A, L153P, F175I, N260A, M323L, K324I, F333N, K346P, E347N, E374P, wherein the positions correspond to SEQ ID NO: 1. In some embodiments, the polypeptide having protease activity comprises an amino acid sequence having at least 50%, at least 60%, at least 70%, at least 80%, at least 81%, at least 82%, at least 83%, at least 84%, at least 85%, at least 86%, at least 87%, at least 88%, at least 89%, at least 90%, at least 91%, at least 92%, at least 93%, at least 94%, at least 95%, at least 96%, at least 97%, at least 98%, or at least 99% sequence identity to SEQ ID NO: 1, provided that the amino acid sequence comprises mutations of S128A, R142K, L153P, N260A, K324I, F333N, K346P, E347N, wherein the positions correspond to SEQ ID NO: 1. In some embodiments, the polypeptide having protease activity comprises an amino acid sequence having at least 50%, at least 60%, at least 70%, at least 80%, at least 81%, at least 82%, at least 83%, at least 84%, at least 85%, at least 86%, at least 87%, at least 88%, at least 89%, at least 90%, at least 91%, at least 92%, at least 93%, at least 94%, at least 95%, at least 96%, at least 97%, at least 98%, or at least 99% sequence identity to SEQ ID NO: 1, provided that the amino acid sequence comprises mutations of S128A, R142K, L153P, Q232E, N260A, K324I, F333N, R337L, K346P, E347N, wherein the positions correspond to SEQ ID NO: 1. In some embodiments, the polypeptide having protease activity comprises an amino acid sequence having at least 50%, at least 60%, at least 70%, at least 80%, at least 81%, at least 82%, at least 83%, at least 84%, at least 85%, at least 86%, at least 87%, at least 88%, at least 89%, at least 90%, at least 91%, at least 92%, at least 93%, at least 94%, at least 95%, at least 96%, at least 97%, at least 98%, or at least 99% sequence identity to SEQ ID NO: 1, provided that the amino acid sequence comprises mutations of S128A, R142K, L153P, Y217W, N260A, K324I, F333N, R337L, K346P, E347N, wherein the positions correspond to SEQ ID NO: 1. In some embodiments, the polypeptide having protease activity comprises an amino acid sequence having at least 50%, at least 60%, at least 70%, at least 80%, at least 81%, at least 82%, at least 83%, at least 84%, at least 85%, at least 86%, at least 87%, at least 88%, at least 89%, at least 90%, at least 91%, at least 92%, at least 93%, at least 94%, at least 95%, at least 96%, at least 97%, at least 98%, or at least 99% sequence identity to SEQ ID NO: 1, provided that the amino acid sequence comprises mutations of K115L, S128A, R142K, L153P, N260A, K324I, F333N, R337L, K346P, E347N, wherein the positions correspond to SEQ ID NO: 1. In some embodiments, the polypeptide having protease activity comprises an amino acid sequence having at least 50%, at least 60%, at least 70%, at least 80%, at least 81%, at least 82%, at least 83%, at least 84%, at least 85%, at least 86%, at least 87%, at least 88%, at least 89%, at least 90%, at least 91%, at least 92%, at least 93%, at least 94%, at least 95%, at least 96%, at least 97%, at least 98%, or at least 99% sequence identity to SEQ ID NO: 1, provided that the amino acid sequence comprises mutations of S128A, R142K, F148Y, L153P, N182D, N260A, S286T, M323L, K324I, F333N, K346P, E347N, wherein the positions correspond to SEQ ID NO: 1. In some embodiments, the polypeptide having protease activity comprises an amino acid sequence having at least 50%, at least 60%, at least 70%, at least 80%, at least 81%, at least 82%, at least 83%, at least 84%, at least 85%, at least 86%, at least 87%, at least 88%, at least 89%, at least 90%, at least 91%, at least 92%, at least 93%, at least 94%, at least 95%, at least 96%, at least 97%, at least 98%, or at least 99% sequence identity to SEQ ID NO: 1, provided that the amino acid sequence comprises mutations of S128A, L153P, N162E, H174E, N219G, K229E, N233G, H275Y, K324I, D332K, F333N, 177_183KEYQSNKdelinsRDNRDN (SEQ ID NOs: 920 and 919), wherein the positions correspond to SEQ ID NO: 1. In some embodiments, the polypeptide having protease activity comprises an amino acid sequence having at least 50%, at least 60%, at least 70%, at least 80%, at least 81%, at least 82%, at least 83%, at least 84%, at least 85%, at least 86%, at least 87%, at least 88%, at least 89%, at least 90%, at least 91%, at least 92%, at least 93%, at least 94%, at least 95%, at least 96%, at least 97%, at least 98%, or at least 99% sequence identity to SEQ ID NO: 1, provided that the amino acid sequence comprises mutations of C125S, S128A, L153P, N162E, H174E, N219G, K229E, N233G, H275Y, K324I, D332K, F333N, 177_183KEYQSNKdelinsRDNRDN (SEQ ID NOs: 920 and 919), wherein the positions correspond to SEQ ID NO: 1. In some embodiments, the polypeptide having protease activity comprises an amino acid sequence having at least 50%, at least 60%, at least 70%, at least 80%, at least 81%, at least 82%, at least 83%, at least 84%, at least 85%, at least 86%, at least 87%, at least 88%, at least 89%, at least 90%, at least 91%, at least 92%, at least 93%, at least 94%, at least 95%, at least 96%, at least 97%, at least 98%, or at least 99% sequence identity to SEQ ID NO: 1, provided that the amino acid sequence comprises mutations of T122S, S128A, L153P, N162E, H174E, N219G, K229E, N233G, H275Y, K324I, D332K, F333N, 177_183KEYQSNKdelinsRDNRDN (SEQ ID NOs: 920 and 919), wherein the positions correspond to SEQ ID NO: 1. In some embodiments, the polypeptide having protease activity comprises an amino acid sequence having at least 50%, at least 60%, at least 70%, at least 80%, at least 81%, at least 82%, at least 83%, at least 84%, at least 85%, at least 86%, at least 87%, at least 88%, at least 89%, at least 90%, at least 91%, at least 92%, at least 93%, at least 94%, at least 95%, at least 96%, at least 97%, at least 98%, or at least 99% sequence identity to SEQ ID NO: 1, provided that the amino acid sequence comprises mutations of T122S, C125S, S128A, L153P, N162E, H174E, N219G, K229E, N233G, H275Y, K324I, D332K, F333N, 177_183KEYQSNKdelinsRDNRDN (SEQ ID NOs: 920 and 919), wherein the positions correspond to SEQ ID NO: 1. In some embodiments, the polypeptide having protease activity comprises an amino acid sequence having at least 50%, at least 60%, at least 70%, at least 80%, at least 81%, at least 82%, at least 83%, at least 84%, at least 85%, at least 86%, at least 87%, at least 88%, at least 89%, at least 90%, at least 91%, at least 92%, at least 93%, at least 94%, at least 95%, at least 96%, at least 97%, at least 98%, or at least 99% sequence identity to SEQ ID NO: 1, provided that the amino acid sequence comprises mutations of S128A, L153P, N162E, H174E, N219G, K229E, H275Y, K324I, F333N, 177_183KEYQSNKdelinsRDNRDN (SEQ ID NOs: 920 and 919), wherein the positions correspond to SEQ ID NO: 1. In some embodiments, the polypeptide having protease activity comprises an amino acid sequence having at least 50%, at least 60%, at least 70%, at least 80%, at least 81%, at least 82%, at least 83%, at least 84%, at least 85%, at least 86%, at least 87%, at least 88%, at least 89%, at least 90%, at least 91%, at least 92%, at least 93%, at least 94%, at least 95%, at least 96%, at least 97%, at least 98%, or at least 99% sequence identity to SEQ ID NO: 1, provided that the amino acid sequence comprises mutations of C125S, S128A, L153P, N162E, H174E, N219G, K229E, H275Y, K324I, F333N, 177_183KEYQSNKdelinsRDNRDN (SEQ ID NOs: 920 and 919), wherein the positions correspond to SEQ ID NO: 1. In some embodiments, the polypeptide having protease activity comprises an amino acid sequence having at least 50%, at least 60%, at least 70%, at least 80%, at least 81%, at least 82%, at least 83%, at least 84%, at least 85%, at least 86%, at least 87%, at least 88%, at least 89%, at least 90%, at least 91%, at least 92%, at least 93%, at least 94%, at least 95%, at least 96%, at least 97%, at least 98%, or at least 99% sequence identity to SEQ ID NO: 1, provided that the amino acid sequence comprises mutations of T122S, S128A, L153P, N162E, H174E, N219G, K229E, H275Y, K324I, F333N, 177_183KEYQSNKdelinsRDNRDN (SEQ ID NOs: 920 and 919), wherein the positions correspond to SEQ ID NO: 1. In some embodiments, the polypeptide having protease activity comprises an amino acid sequence having at least 50%, at least 60%, at least 70%, at least 80%, at least 81%, at least 82%, at least 83%, at least 84%, at least 85%, at least 86%, at least 87%, at least 88%, at least 89%, at least 90%, at least 91%, at least 92%, at least 93%, at least 94%, at least 95%, at least 96%, at least 97%, at least 98%, or at least 99% sequence identity to SEQ ID NO: 1, provided that the amino acid sequence comprises mutations of T122S, C125S, S128A, L153P, N162E, H174E, N219G, K229E, H275Y, K324I, F333N, 177_183KEYQSNKdelinsRDNRDN (SEQ ID NOs: 920 and 919), wherein the positions correspond to SEQ ID NO: 1. In some embodiments, the polypeptide having protease activity comprises an amino acid sequence having at least 50%, at least 60%, at least 70%, at least 80%, at least 81%, at least 82%, at least 83%, at least 84%, at least 85%, at least 86%, at least 87%, at least 88%, at least 89%, at least 90%, at least 91%, at least 92%, at least 93%, at least 94%, at least 95%, at least 96%, at least 97%, at least 98%, or at least 99% sequence identity to SEQ ID NO: 1, provided that the amino acid sequence comprises mutations of S128A, L153P, K324I, F333N, 380insENNVADSNKNSEDVEVSSVEFDFLNFKYPKNEDQVSTEDMRLTLKDTNVFNQPQ VKISFEEQNGNDWKEKDSGTFEEGKKYRLKIDVNKLALKIYGHLSKNKLNVIVNGKAV NIQNVVKKDSIETSFTIYSDSIDLEKINYWTDSFNNWS (SEQ ID NO: 744), wherein the positions correspond to SEQ ID NO: 1. In some embodiments, the polypeptide having protease activity comprises an amino acid sequence having at least 50%, at least 60%, at least 70%, at least 80%, at least 81%, at least 82%, at least 83%, at least 84%, at least 85%, at least 86%, at least 87%, at least 88%, at least 89%, at least 90%, at least 91%, at least 92%, at least 93%, at least 94%, at least 95%, at least 96%, at least 97%, at least 98%, or at least 99% sequence identity to SEQ ID NO: 1, provided that the amino acid sequence comprises mutations of S128A, L153P, N162E, N219G, K229E, K324I, F333N, 177_183KEYQSNKdelinsRDNRDN (SEQ ID NOs: 920 and 919), wherein the positions correspond to SEQ ID NO: 1. In some embodiments, the polypeptide having protease activity comprises an amino acid sequence having at least 50%, at least 60%, at least 70%, at least 80%, at least 81%, at least 82%, at least 83%, at least 84%, at least 85%, at least 86%, at least 87%, at least 88%, at least 89%, at least 90%, at least 91%, at least 92%, at least 93%, at least 94%, at least 95%, at least 96%, at least 97%, at least 98%, or at least 99% sequence identity to SEQ ID NO: 1, provided that the amino acid sequence comprises mutations of S128A, L153P, N162E, N219G, K229E, H275Y, K324I, F333N, 177_183KEYQSNKdelinsRDNRDN (SEQ ID NOs: 920 and 919), wherein the positions correspond to SEQ ID NO: 1. In some embodiments, the polypeptide having protease activity comprises an amino acid sequence having at least 50%, at least 60%, at least 70%, at least 80%, at least 81%, at least 82%, at least 83%, at least 84%, at least 85%, at least 86%, at least 87%, at least 88%, at least 89%, at least 90%, at least 91%, at least 92%, at least 93%, at least 94%, at least 95%, at least 96%, at least 97%, at least 98%, or at least 99% sequence identity to SEQ ID NO: 1, provided that the amino acid sequence comprises mutations of T122S, S128A, L153P, N162E, N219G, K229E, K324I, F333N, 177_183KEYQSNKdelinsRDNRDN (SEQ ID NOs: 920 and 919), wherein the positions correspond to SEQ ID NO: 1. In some embodiments, the polypeptide having protease activity comprises an amino acid sequence having at least 50%, at least 60%, at least 70%, at least 80%, at least 81%, at least 82%, at least 83%, at least 84%, at least 85%, at least 86%, at least 87%, at least 88%, at least 89%, at least 90%, at least 91%, at least 92%, at least 93%, at least 94%, at least 95%, at least 96%, at least 97%, at least 98%, or at least 99% sequence identity to SEQ ID NO: 1, provided that the amino acid sequence comprises mutations of S128A, L153P, N162E, N219G, K229E, H275Y, R280T, K324I, F333N, 177_183KEYQSNKdelinsRDNRDN (SEQ ID NOs: 920 and 919), wherein the positions correspond to SEQ ID NO: 1. In some embodiments, the polypeptide having protease activity comprises an amino acid sequence having at least 50%, at least 60%, at least 70%, at least 80%, at least 81%, at least 82%, at least 83%, at least 84%, at least 85%, at least 86%, at least 87%, at least 88%, at least 89%, at least 90%, at least 91%, at least 92%, at least 93%, at least 94%, at least 95%, at least 96%, at least 97%, at least 98%, or at least 99% sequence identity to SEQ ID NO: 1, provided that the amino acid sequence comprises mutations of T122S, S128A, L153P, N162E, N219G, K229E, R280T, K324I, F333N, 177_183KEYQSNKdelinsRDNRDN (SEQ ID NOs: 920 and 919), wherein the positions correspond to SEQ ID NO: 1. In some embodiments, the polypeptide having protease activity comprises an amino acid sequence having at least 50%, at least 60%, at least 70%, at least 80%, at least 81%, at least 82%, at least 83%, at least 84%, at least 85%, at least 86%, at least 87%, at least 88%, at least 89%, at least 90%, at least 91%, at least 92%, at least 93%, at least 94%, at least 95%, at least 96%, at least 97%, at least 98%, or at least 99% sequence identity to SEQ ID NO: 1, provided that the amino acid sequence comprises mutations of D71Q, S128A, L153P, N162E, N219G, K229E, K324I, F333N, 177_183KEYQSNKdelinsRDNRDN (SEQ ID NOs: 920 and 919), wherein the positions correspond to SEQ ID NO: 1. In some embodiments, the polypeptide having protease activity comprises an amino acid sequence having at least 50%, at least 60%, at least 70%, at least 80%, at least 81%, at least 82%, at least 83%, at least 84%, at least 85%, at least 86%, at least 87%, at least 88%, at least 89%, at least 90%, at least 91%, at least 92%, at least 93%, at least 94%, at least 95%, at least 96%, at least 97%, at least 98%, or at least 99% sequence identity to SEQ ID NO: 1, provided that the amino acid sequence comprises mutations of T122S, S128A, L153P, N162E, N219G, K229E, H275Y, K324I, F333N, 177_183KEYQSNKdelinsRDNRDN (SEQ ID NOs: 920 and 919), wherein the positions correspond to SEQ ID NO: 1. In some embodiments, the polypeptide having protease activity comprises an amino acid sequence having at least 50%, at least 60%, at least 70%, at least 80%, at least 81%, at least 82%, at least 83%, at least 84%, at least 85%, at least 86%, at least 87%, at least 88%, at least 89%, at least 90%, at least 91%, at least 92%, at least 93%, at least 94%, at least 95%, at least 96%, at least 97%, at least 98%, or at least 99% sequence identity to SEQ ID NO: 1, provided that the amino acid sequence comprises mutations of S128A, L153P, N162E, N219G, K229E, H275Y, K318S, K324I, F333N, 177_183KEYQSNKdelinsRDNRDN (SEQ ID NOs: 920 and 919), wherein the positions correspond to SEQ ID NO: 1. In some embodiments, the polypeptide having protease activity comprises an amino acid sequence having at least 50%, at least 60%, at least 70%, at least 80%, at least 81%, at least 82%, at least 83%, at least 84%, at least 85%, at least 86%, at least 87%, at least 88%, at least 89%, at least 90%, at least 91%, at least 92%, at least 93%, at least 94%, at least 95%, at least 96%, at least 97%, at least 98%, or at least 99% sequence identity to SEQ ID NO: 1, provided that the amino acid sequence comprises mutations of S128A, L153P, N162E, N219G, K229E, K318S, K324I, F333N, 177_183KEYQSNKdelinsRDNRDN (SEQ ID NOS: 920 and 919), wherein the positions correspond to SEQ ID NO: 1. In some embodiments, the polypeptide having protease activity comprises an amino acid sequence having at least 50%, at least 60%, at least 70%, at least 80%, at least 81%, at least 82%, at least 83%, at least 84%, at least 85%, at least 86%, at least 87%, at least 88%, at least 89%, at least 90%, at least 91%, at least 92%, at least 93%, at least 94%, at least 95%, at least 96%, at least 97%, at least 98%, or at least 99% sequence identity to SEQ ID NO: 1, provided that the amino acid sequence comprises mutations of S128A, L153P, N219G, H275Y, K324I, F333N, 177_183KEYQSNKdelinsRDNRDN (SEQ ID NOs: 920 and 919), wherein the positions correspond to SEQ ID NO: 1. In some embodiments, the polypeptide having protease activity comprises an amino acid sequence having at least 50%, at least 60%, at least 70%, at least 80%, at least 81%, at least 82%, at least 83%, at least 84%, at least 85%, at least 86%, at least 87%, at least 88%, at least 89%, at least 90%, at least 91%, at least 92%, at least 93%, at least 94%, at least 95%, at least 96%, at least 97%, at least 98%, or at least 99% sequence identity to SEQ ID NO: 1, provided that the amino acid sequence comprises mutations of T122S, S128A, L153P, N219G, K324I, F333N, 177_183KEYQSNKdelinsRDNRDN (SEQ ID NOs: 920 and 919), wherein the positions correspond to SEQ ID NO: 1. In some embodiments, the polypeptide having protease activity comprises an amino acid sequence having at least 50%, at least 60%, at least 70%, at least 80%, at least 81%, at least 82%, at least 83%, at least 84%, at least 85%, at least 86%, at least 87%, at least 88%, at least 89%, at least 90%, at least 91%, at least 92%, at least 93%, at least 94%, at least 95%, at least 96%, at least 97%, at least 98%, or at least 99% sequence identity to SEQ ID NO: 1, provided that the amino acid sequence comprises mutations of D71Q, S128A, L153P, N219G, K324I, F333N, 177_183KEYQSNKdelinsRDNRDN (SEQ ID NOs: 920 and 919), wherein the positions correspond to SEQ ID NO: 1. In some embodiments, the polypeptide having protease activity comprises an amino acid sequence having at least 50%, at least 60%, at least 70%, at least 80%, at least 81%, at least 82%, at least 83%, at least 84%, at least 85%, at least 86%, at least 87%, at least 88%, at least 89%, at least 90%, at least 91%, at least 92%, at least 93%, at least 94%, at least 95%, at least 96%, at least 97%, at least 98%, or at least 99% sequence identity to SEQ ID NO: 1, provided that the amino acid sequence comprises mutations of S128A, L153P, N162E, N219Q, K229E, K324I, F333N, 177_183KEYQSNKdelinsRDNRDN (SEQ ID NOs: 920 and 919), wherein the positions correspond to SEQ ID NO: 1. In some embodiments, the polypeptide having protease activity comprises an amino acid sequence having at least 50%, at least 60%, at least 70%, at least 80%, at least 81%, at least 82%, at least 83%, at least 84%, at least 85%, at least 86%, at least 87%, at least 88%, at least 89%, at least 90%, at least 91%, at least 92%, at least 93%, at least 94%, at least 95%, at least 96%, at least 97%, at least 98%, or at least 99% sequence identity to SEQ ID NO: 1, provided that the amino acid sequence comprises mutations of D71Q, S128A, L153P, N162E, N219Q, K229E, K324I, F333N, 177_183KEYQSNKdelinsRDNRDN (SEQ ID NOs: 920 and 919), wherein the positions correspond to SEQ ID NO: 1. In some embodiments, the polypeptide having protease activity comprises an amino acid sequence having at least 50%, at least 60%, at least 70%, at least 80%, at least 81%, at least 82%, at least 83%, at least 84%, at least 85%, at least 86%, at least 87%, at least 88%, at least 89%, at least 90%, at least 91%, at least 92%, at least 93%, at least 94%, at least 95%, at least 96%, at least 97%, at least 98%, or at least 99% sequence identity to SEQ ID NO: 1, provided that the amino acid sequence comprises mutations of S128A, L153P, N162E, N219Q, K229E, H275Y, K324I, F333N, 177_183KEYQSNKdelinsRDNRDN (SEQ ID NOs: 920 and 919), wherein the positions correspond to SEQ ID NO: 1. In some embodiments, the polypeptide having protease activity comprises an amino acid sequence having at least 50%, at least 60%, at least 70%, at least 80%, at least 81%, at least 82%, at least 83%, at least 84%, at least 85%, at least 86%, at least 87%, at least 88%, at least 89%, at least 90%, at least 91%, at least 92%, at least 93%, at least 94%, at least 95%, at least 96%, at least 97%, at least 98%, or at least 99% sequence identity to SEQ ID NO: 1, provided that the amino acid sequence comprises mutations of T122S, S128A, L153P, N162E, N219Q, K229E, K324I, F333N, 177_183KEYQSNKdelinsRDNRDN (SEQ ID NOS: 920 and 919), wherein the positions correspond to SEQ ID NO: 1. In some embodiments, the polypeptide having protease activity comprises an amino acid sequence having at least 50%, at least 60%, at least 70%, at least 80%, at least 81%, at least 82%, at least 83%, at least 84%, at least 85%, at least 86%, at least 87%, at least 88%, at least 89%, at least 90%, at least 91%, at least 92%, at least 93%, at least 94%, at least 95%, at least 96%, at least 97%, at least 98%, or at least 99% sequence identity to SEQ ID NO: 1, provided that the amino acid sequence comprises mutations of S128A, L153P, N162E, N219Q, K229E, H275Y, R280T, K324I, F333N, 177_183KEYQSNKdelinsRDNRDN (SEQ ID NOs: 920 and 919), wherein the positions correspond to SEQ ID NO: 1. In some embodiments, the polypeptide having protease activity comprises an amino acid sequence having at least 50%, at least 60%, at least 70%, at least 80%, at least 81%, at least 82%, at least 83%, at least 84%, at least 85%, at least 86%, at least 87%, at least 88%, at least 89%, at least 90%, at least 91%, at least 92%, at least 93%, at least 94%, at least 95%, at least 96%, at least 97%, at least 98%, or at least 99% sequence identity to SEQ ID NO: 1, provided that the amino acid sequence comprises mutations of T122S, S128A, L153P, N162E, N219Q, K229E, R280T, K324I, F333N, 177_183KEYQSNKdelinsRDNRDN (SEQ ID NOs: 920 and 919), wherein the positions correspond to SEQ ID NO: 1. In some embodiments, the polypeptide having protease activity comprises an amino acid sequence having at least 50%, at least 60%, at least 70%, at least 80%, at least 81%, at least 82%, at least 83%, at least 84%, at least 85%, at least 86%, at least 87%, at least 88%, at least 89%, at least 90%, at least 91%, at least 92%, at least 93%, at least 94%, at least 95%, at least 96%, at least 97%, at least 98%, or at least 99% sequence identity to SEQ ID NO: 1, provided that the amino acid sequence comprises mutations of T122S, S128A, L153P, N162E, N219Q, K229E, H275Y, K324I, F333N, 177_183KEYQSNKdelinsRDNRDN (SEQ ID NOs: 920 and 919), wherein the positions correspond to SEQ ID NO: 1. In some embodiments, the polypeptide having protease activity comprises an amino acid sequence having at least 50%, at least 60%, at least 70%, at least 80%, at least 81%, at least 82%, at least 83%, at least 84%, at least 85%, at least 86%, at least 87%, at least 88%, at least 89%, at least 90%, at least 91%, at least 92%, at least 93%, at least 94%, at least 95%, at least 96%, at least 97%, at least 98%, or at least 99% sequence identity to SEQ ID NO: 1, provided that the amino acid sequence comprises mutations of S128A, L153P, N162E, N219Q, K229E, H275Y, K318S, K324I, F333N, 177_183KEYQSNKdelinsRDNRDN (SEQ ID NOs: 920 and 919), wherein the positions correspond to SEQ ID NO: 1. In some embodiments, the polypeptide having protease activity comprises an amino acid sequence having at least 50%, at least 60%, at least 70%, at least 80%, at least 81%, at least 82%, at least 83%, at least 84%, at least 85%, at least 86%, at least 87%, at least 88%, at least 89%, at least 90%, at least 91%, at least 92%, at least 93%, at least 94%, at least 95%, at least 96%, at least 97%, at least 98%, or at least 99% sequence identity to SEQ ID NO: 1, provided that the amino acid sequence comprises mutations of S128A, L153P, N162E, N219Q, K229E, K318S, K324I, F333N, 177_183KEYQSNKdelinsRDNRDN (SEQ ID NOs: 920 and 919), wherein the positions correspond to SEQ ID NO: 1. In some embodiments, the polypeptide having protease activity comprises an amino acid sequence having at least 50%, at least 60%, at least 70%, at least 80%, at least 81%, at least 82%, at least 83%, at least 84%, at least 85%, at least 86%, at least 87%, at least 88%, at least 89%, at least 90%, at least 91%, at least 92%, at least 93%, at least 94%, at least 95%, at least 96%, at least 97%, at least 98%, or at least 99% sequence identity to SEQ ID NO: 1, provided that the amino acid sequence comprises mutations of S128A, L153P, N219Q, H275Y, K324I, F333N, 177_183KEYQSNKdelinsRDNRDN (SEQ ID NOs: 920 and 919), wherein the positions correspond to SEQ ID NO: 1. In some embodiments, the polypeptide having protease activity comprises an amino acid sequence having at least 50%, at least 60%, at least 70%, at least 80%, at least 81%, at least 82%, at least 83%, at least 84%, at least 85%, at least 86%, at least 87%, at least 88%, at least 89%, at least 90%, at least 91%, at least 92%, at least 93%, at least 94%, at least 95%, at least 96%, at least 97%, at least 98%, or at least 99% sequence identity to SEQ ID NO: 1, provided that the amino acid sequence comprises mutations of T122S, S128A, L153P, N219Q, K324I, F333N, 177_183KEYQSNKdelinsRDNRDN (SEQ ID NOs: 920 and 919), wherein the positions correspond to SEQ ID NO: 1. In some embodiments, the polypeptide having protease activity comprises an amino acid sequence having at least 50%, at least 60%, at least 70%, at least 80%, at least 81%, at least 82%, at least 83%, at least 84%, at least 85%, at least 86%, at least 87%, at least 88%, at least 89%, at least 90%, at least 91%, at least 92%, at least 93%, at least 94%, at least 95%, at least 96%, at least 97%, at least 98%, or at least 99% sequence identity to SEQ ID NO: 1, provided that the amino acid sequence comprises mutations of D71Q, S128A, L153P, N219Q, K324I, F333N, 177_183KEYQSNKdelinsRDNRDN (SEQ ID NOs: 920 and 919), wherein the positions correspond to SEQ ID NO: 1. In some embodiments, the polypeptide having protease activity comprises an amino acid sequence having at least 50%, at least 60%, at least 70%, at least 80%, at least 81%, at least 82%, at least 83%, at least 84%, at least 85%, at least 86%, at least 87%, at least 88%, at least 89%, at least 90%, at least 91%, at least 92%, at least 93%, at least 94%, at least 95%, at least 96%, at least 97%, at least 98%, or at least 99% sequence identity to SEQ ID NO: 1, provided that the amino acid sequence comprises mutations of S128A, L153P, N162E, K229E, K324I, F333N, 177_183KEYQSNKdelinsRDNRDN (SEQ ID NOs: 920 and 919), wherein the positions correspond to SEQ ID NO: 1. In some embodiments, the polypeptide having protease activity comprises an amino acid sequence having at least 50%, at least 60%, at least 70%, at least 80%, at least 81%, at least 82%, at least 83%, at least 84%, at least 85%, at least 86%, at least 87%, at least 88%, at least 89%, at least 90%, at least 91%, at least 92%, at least 93%, at least 94%, at least 95%, at least 96%, at least 97%, at least 98%, or at least 99% sequence identity to SEQ ID NO: 1, provided that the amino acid sequence comprises mutations of S128A, L153P, N162E, K229E, H275Y, K324I, F333N, 177_183KEYQSNKdelinsRDNRDN (SEQ ID NOs: 920 and 919), wherein the positions correspond to SEQ ID NO: 1. In some embodiments, the polypeptide having protease activity comprises an amino acid sequence having at least 50%, at least 60%, at least 70%, at least 80%, at least 81%, at least 82%, at least 83%, at least 84%, at least 85%, at least 86%, at least 87%, at least 88%, at least 89%, at least 90%, at least 91%, at least 92%, at least 93%, at least 94%, at least 95%, at least 96%, at least 97%, at least 98%, or at least 99% sequence identity to SEQ ID NO: 1, provided that the amino acid sequence comprises mutations of T122S, S128A, L153P, N162E, K229E, K324I, F333N, 177_183KEYQSNKdelinsRDNRDN (SEQ ID NOs: 920 and 919), wherein the positions correspond to SEQ ID NO: 1. In some embodiments, the polypeptide having protease activity comprises an amino acid sequence having at least 50%, at least 60%, at least 70%, at least 80%, at least 81%, at least 82%, at least 83%, at least 84%, at least 85%, at least 86%, at least 87%, at least 88%, at least 89%, at least 90%, at least 91%, at least 92%, at least 93%, at least 94%, at least 95%, at least 96%, at least 97%, at least 98%, or at least 99% sequence identity to SEQ ID NO: 1, provided that the amino acid sequence comprises mutations of S128A, L153P, N162E, H174E, G199P, N219G, K229E, H275Y, K324I, F333N, 177_183KEYQSNKdelinsRDNRDN (SEQ ID NOs: 920 and 919), wherein the positions correspond to SEQ ID NO: 1. In some embodiments, the polypeptide having protease activity comprises an amino acid sequence having at least 50%, at least 60%, at least 70%, at least 80%, at least 81%, at least 82%, at least 83%, at least 84%, at least 85%, at least 86%, at least 87%, at least 88%, at least 89%, at least 90%, at least 91%, at least 92%, at least 93%, at least 94%, at least 95%, at least 96%, at least 97%, at least 98%, or at least 99% sequence identity to SEQ ID NO: 1, provided that the amino acid sequence comprises mutations of S128A, L153P, N162E, H174E, G199P, N219G, K229E, I262K, H275Y, K324I, F333N, 177_183KEYQSNKdelinsRDNRDN (SEQ ID NOs: 920 and 919), wherein the positions correspond to SEQ ID NO: 1. In some embodiments, the polypeptide having protease activity comprises an amino acid sequence having at least 50%, at least 60%, at least 70%, at least 80%, at least 81%, at least 82%, at least 83%, at least 84%, at least 85%, at least 86%, at least 87%, at least 88%, at least 89%, at least 90%, at least 91%, at least 92%, at least 93%, at least 94%, at least 95%, at least 96%, at least 97%, at least 98%, or at least 99% sequence identity to SEQ ID NO: 1, provided that the amino acid sequence comprises mutations of S128A, L153P, N162E, H174E, G199P, N219G, K229E, H275Y, R282G, K324I, F333N, 177_183KEYQSNKdelinsRDNRDN (SEQ ID NOs: 920 and 919), wherein the positions correspond to SEQ ID NO: 1. In some embodiments, the polypeptide having protease activity comprises an amino acid sequence having at least 50%, at least 60%, at least 70%, at least 80%, at least 81%, at least 82%, at least 83%, at least 84%, at least 85%, at least 86%, at least 87%, at least 88%, at least 89%, at least 90%, at least 91%, at least 92%, at least 93%, at least 94%, at least 95%, at least 96%, at least 97%, at least 98%, or at least 99% sequence identity to SEQ ID NO: 1, provided that the amino acid sequence comprises mutations of K93D, S128A, K150E, L153P, N162E, H174E, G199P, N219G, K229E, H275Y, R282G, K324I, F333N, 177_183KEYQSNKdelinsRDNRDN (SEQ ID NOs: 920 and 919), wherein the positions correspond to SEQ ID NO: 1. In some embodiments, the polypeptide having protease activity comprises an amino acid sequence having at least 50%, at least 60%, at least 70%, at least 80%, at least 81%, at least 82%, at least 83%, at least 84%, at least 85%, at least 86%, at least 87%, at least 88%, at least 89%, at least 90%, at least 91%, at least 92%, at least 93%, at least 94%, at least 95%, at least 96%, at least 97%, at least 98%, or at least 99% sequence identity to SEQ ID NO: 1, provided that the amino acid sequence comprises mutations of S128A, D139E, L153P, N162E, H174E, G199P, N219G, K229E, E241D, H275Y, R282G, K324I, F333N, 177_183KEYQSNKdelinsRDNRDN (SEQ ID NOs: 920 and 919), wherein the positions correspond to SEQ ID NO: 1. In some embodiments, the polypeptide having protease activity comprises an amino acid sequence having at least 50%, at least 60%, at least 70%, at least 80%, at least 81%, at least 82%, at least 83%, at least 84%, at least 85%, at least 86%, at least 87%, at least 88%, at least 89%, at least 90%, at least 91%, at least 92%, at least 93%, at least 94%, at least 95%, at least 96%, at least 97%, at least 98%, or at least 99% sequence identity to SEQ ID NO: 1, provided that the amino acid sequence comprises mutations of S128A, L153P, N162E, H174E, G199P, N219G, K229E, H275Y, R282G, K324I, F333N, A343K, R360L, 177_183KEYQSNKdelinsRDNRDN (SEQ ID NOs: 920 and 919), wherein the positions correspond to SEQ ID NO: 1. In some embodiments, the polypeptide having protease activity comprises an amino acid sequence having at least 50%, at least 60%, at least 70%, at least 80%, at least 81%, at least 82%, at least 83%, at least 84%, at least 85%, at least 86%, at least 87%, at least 88%, at least 89%, at least 90%, at least 91%, at least 92%, at least 93%, at least 94%, at least 95%, at least 96%, at least 97%, at least 98%, or at least 99% sequence identity to SEQ ID NO: 1, provided that the amino acid sequence comprises mutations of S128A, D139E, L153P, N162E, H174E, G199P, N219G, K229E, E241D, H275Y, R282G, K324I, F333N, A343K, R360L, 177_183KEYQSNKdelinsRDNRDN (SEQ ID NOs: 920 and 919), wherein the positions correspond to SEQ ID NO: 1. In some embodiments, the polypeptide having protease activity comprises an amino acid sequence having at least 50%, at least 60%, at least 70%, at least 80%, at least 81%, at least 82%, at least 83%, at least 84%, at least 85%, at least 86%, at least 87%, at least 88%, at least 89%, at least 90%, at least 91%, at least 92%, at least 93%, at least 94%, at least 95%, at least 96%, at least 97%, at least 98%, or at least 99% sequence identity to SEQ ID NO: 1, provided that the amino acid sequence comprises mutations of K93D, S128A, D139E, K150E, L153P, N162E, H174E, G199P, N219G, K229E, E241D, H275Y, R282G, K324I, F333N, 177_183KEYQSNKdelinsRDNRDN (SEQ ID NOs: 920 and 919), wherein the positions correspond to SEQ ID NO: 1. In some embodiments, the polypeptide having protease activity comprises an amino acid sequence having at least 50%, at least 60%, at least 70%, at least 80%, at least 81%, at least 82%, at least 83%, at least 84%, at least 85%, at least 86%, at least 87%, at least 88%, at least 89%, at least 90%, at least 91%, at least 92%, at least 93%, at least 94%, at least 95%, at least 96%, at least 97%, at least 98%, or at least 99% sequence identity to SEQ ID NO: 1, provided that the amino acid sequence comprises mutations of K93D, S128A, K150E, L153P, N162E, H174E, G199P, N219G, K229E, H275Y, R282G, K324I, F333N, A343K, R360L, 177_183KEYQSNKdelinsRDNRDN (SEQ ID NOs: 920 and 919), wherein the positions correspond to SEQ ID NO: 1. In some embodiments, the polypeptide having protease activity comprises an amino acid sequence having at least 50%, at least 60%, at least 70%, at least 80%, at least 81%, at least 82%, at least 83%, at least 84%, at least 85%, at least 86%, at least 87%, at least 88%, at least 89%, at least 90%, at least 91%, at least 92%, at least 93%, at least 94%, at least 95%, at least 96%, at least 97%, at least 98%, or at least 99% sequence identity to SEQ ID NO: 1, provided that the amino acid sequence comprises mutations of S128A, L153P, N162E, H174E, G199P, N219G, K229E, I262K, H275Y, R282G, K324I, F333N, 177_183KEYQSNKdelinsRDNRDN (SEQ ID NOs: 920 and 919), wherein the positions correspond to SEQ ID NO: 1. In some embodiments, the polypeptide having protease activity comprises an amino acid sequence having at least 50%, at least 60%, at least 70%, at least 80%, at least 81%, at least 82%, at least 83%, at least 84%, at least 85%, at least 86%, at least 87%, at least 88%, at least 89%, at least 90%, at least 91%, at least 92%, at least 93%, at least 94%, at least 95%, at least 96%, at least 97%, at least 98%, or at least 99% sequence identity to SEQ ID NO: 1, provided that the amino acid sequence comprises mutations of K93D, S128A, K150E, L153P, N162E, H174E, G199P, N219G, K229E, I262K, H275Y, R282G, K324I, F333N, 177_183KEYQSNKdelinsRDNRDN (SEQ ID NOs: 920 and 919), wherein the positions correspond to SEQ ID NO: 1. In some embodiments, the polypeptide having protease activity comprises an amino acid sequence having at least 50%, at least 60%, at least 70%, at least 80%, at least 81%, at least 82%, at least 83%, at least 84%, at least 85%, at least 86%, at least 87%, at least 88%, at least 89%, at least 90%, at least 91%, at least 92%, at least 93%, at least 94%, at least 95%, at least 96%, at least 97%, at least 98%, or at least 99% sequence identity to SEQ ID NO: 1, provided that the amino acid sequence comprises mutations of S128A, D139E, L153P, N162E, H174E, G199P, N219G, K229E, E241D, I262K, H275Y, R282G, K324I, F333N, 177_183KEYQSNKdelinsRDNRDN (SEQ ID NOs: 920 and 919), wherein the positions correspond to SEQ ID NO: 1. In some embodiments, the polypeptide having protease activity comprises an amino acid sequence having at least 50%, at least 60%, at least 70%, at least 80%, at least 81%, at least 82%, at least 83%, at least 84%, at least 85%, at least 86%, at least 87%, at least 88%, at least 89%, at least 90%, at least 91%, at least 92%, at least 93%, at least 94%, at least 95%, at least 96%, at least 97%, at least 98%, or at least 99% sequence identity to SEQ ID NO: 1, provided that the amino acid sequence comprises mutations of S128A, L153P, N162E, H174E, G199P, N219G, K229E, I262K, H275Y, R282G, K324I, F333N, A343K, R360L, 177_183KEYQSNKdelinsRDNRDN (SEQ ID NOs: 920 and 919), wherein the positions correspond to SEQ ID NO: 1. In some embodiments, the polypeptide having protease activity comprises an amino acid sequence having at least 50%, at least 60%, at least 70%, at least 80%, at least 81%, at least 82%, at least 83%, at least 84%, at least 85%, at least 86%, at least 87%, at least 88%, at least 89%, at least 90%, at least 91%, at least 92%, at least 93%, at least 94%, at least 95%, at least 96%, at least 97%, at least 98%, or at least 99% sequence identity to SEQ ID NO: 1, provided that the amino acid sequence comprises mutations of S128A, D139E, L153P, N162E, H174E, G199P, N219G, K229E, E241D, I262K, H275Y, R282G, K324I, F333N, A343K, R360L, 177_183KEYQSNKdelinsRDNRDN (SEQ ID NOs: 920 and 919), wherein the positions correspond to SEQ ID NO: 1. In some embodiments, the polypeptide having protease activity comprises an amino acid sequence having at least 50%, at least 60%, at least 70%, at least 80%, at least 81%, at least 82%, at least 83%, at least 84%, at least 85%, at least 86%, at least 87%, at least 88%, at least 89%, at least 90%, at least 91%, at least 92%, at least 93%, at least 94%, at least 95%, at least 96%, at least 97%, at least 98%, or at least 99% sequence identity to SEQ ID NO: 1, provided that the amino acid sequence comprises mutations of K93D, S128A, D139E, K150E, L153P, N162E, H174E, G199P, N219G, K229E, E241D, I262K, H275Y, R282G, K324I, F333N, 177_183KEYQSNKdelinsRDNRDN (SEQ ID NOs: 920 and 919), wherein the positions correspond to SEQ ID NO: 1. In some embodiments, the polypeptide having protease activity comprises an amino acid sequence having at least 50%, at least 60%, at least 70%, at least 80%, at least 81%, at least 82%, at least 83%, at least 84%, at least 85%, at least 86%, at least 87%, at least 88%, at least 89%, at least 90%, at least 91%, at least 92%, at least 93%, at least 94%, at least 95%, at least 96%, at least 97%, at least 98%, or at least 99% sequence identity to SEQ ID NO: 1, provided that the amino acid sequence comprises mutations of K93D, S128A, K150E, L153P, N162E, H174E, G199P, N219G, K229E, I262K, H275Y, R282G, K324I, F333N, A343K, R360L, 177_183KEYQSNKdelinsRDNRDN (SEQ ID NOs: 920 and 919), wherein the positions correspond to SEQ ID NO: 1. In some embodiments, the polypeptide having protease activity comprises an amino acid sequence having at least 50%, at least 60%, at least 70%, at least 80%, at least 81%, at least 82%, at least 83%, at least 84%, at least 85%, at least 86%, at least 87%, at least 88%, at least 89%, at least 90%, at least 91%, at least 92%, at least 93%, at least 94%, at least 95%, at least 96%, at least 97%, at least 98%, or at least 99% sequence identity to SEQ ID NO: 1, provided that the amino acid sequence comprises mutations of K93D, S128A, D139E, K150E, L153P, N162E, H174E, G199P, N219G, K229E, E241D, I262K, H275Y, R282G, S306P, K324I, F333N, 177_183KEYQSNKdelinsRDNRDN (SEQ ID NOs: 920 and 919), wherein the positions correspond to SEQ ID NO: 1. In some embodiments, the polypeptide having protease activity comprises an amino acid sequence having at least 50%, at least 60%, at least 70%, at least 80%, at least 81%, at least 82%, at least 83%, at least 84%, at least 85%, at least 86%, at least 87%, at least 88%, at least 89%, at least 90%, at least 91%, at least 92%, at least 93%, at least 94%, at least 95%, at least 96%, at least 97%, at least 98%, or at least 99% sequence identity to SEQ ID NO: 1, provided that the amino acid sequence comprises mutations of K93D, S128A, K150E, L153P, N162E, H174E, G199P, N219G, K229E, I262K, H275Y, R282G, S306P, K324I, F333N, A343K, R360L, 177_183KEYQSNKdelinsRDNRDN (SEQ ID NOs: 920 and 919), wherein the positions correspond to SEQ ID NO: 1. In some embodiments, the polypeptide having protease activity comprises an amino acid sequence having at least 50%, at least 60%, at least 70%, at least 80%, at least 81%, at least 82%, at least 83%, at least 84%, at least 85%, at least 86%, at least 87%, at least 88%, at least 89%, at least 90%, at least 91%, at least 92%, at least 93%, at least 94%, at least 95%, at least 96%, at least 97%, at least 98%, or at least 99% sequence identity to SEQ ID NO: 1, provided that the amino acid sequence comprises mutations of K93D, S128A, D139E, K150E, L153P, N162E, H174E, G199P, N219G, K229E, E241D, I262K, H275Y, R282G, S306P, K324I, F333N, A343K, R360L, 177_183KEYQSNKdelinsRDNRDN (SEQ ID NOs: 920 and 919), wherein the positions correspond to SEQ ID NO: 1. In some embodiments, the polypeptide having protease activity comprises an amino acid sequence having at least 50%, at least 60%, at least 70%, at least 80%, at least 81%, at least 82%, at least 83%, at least 84%, at least 85%, at least 86%, at least 87%, at least 88%, at least 89%, at least 90%, at least 91%, at least 92%, at least 93%, at least 94%, at least 95%, at least 96%, at least 97%, at least 98%, or at least 99% sequence identity to SEQ ID NO: 1, provided that the amino acid sequence comprises mutations of K93D, S128A, K150E, L153P, N162E, H174E, G199P, N219G, K229E, I262K, H275Y, R282G, K324I, F333E, 177_183KEYQSNKdelinsRDNRDN (SEQ ID NOs: 920 and 919), wherein the positions correspond to SEQ ID NO: 1. In some embodiments, the polypeptide having protease activity comprises an amino acid sequence having at least 50%, at least 60%, at least 70%, at least 80%, at least 81%, at least 82%, at least 83%, at least 84%, at least 85%, at least 86%, at least 87%, at least 88%, at least 89%, at least 90%, at least 91%, at least 92%, at least 93%, at least 94%, at least 95%, at least 96%, at least 97%, at least 98%, or at least 99% sequence identity to SEQ ID NO: 1, provided that the amino acid sequence comprises mutations of K93D, S128A, D139E, K150E, L153P, N162E, H174E, G199P, N219G, K229E, E241D, I262K, H275Y, R282G, K324I, F333E, 177_183KEYQSNKdelinsRDNRDN (SEQ ID NOs: 920 and 919), wherein the positions correspond to SEQ ID NO: 1. In some embodiments, the polypeptide having protease activity comprises an amino acid sequence having at least 50%, at least 60%, at least 70%, at least 80%, at least 81%, at least 82%, at least 83%, at least 84%, at least 85%, at least 86%, at least 87%, at least 88%, at least 89%, at least 90%, at least 91%, at least 92%, at least 93%, at least 94%, at least 95%, at least 96%, at least 97%, at least 98%, or at least 99% sequence identity to SEQ ID NO: 1, provided that the amino acid sequence comprises mutations of K93D, S128A, D139E, K150E, L153P, N162E, H174E, G199P, N219G, K229E, E241D, I262K, H275Y, R282G, K324I, F333E, A343K, R360L, 177_183KEYQSNKdelinsRDNRDN (SEQ ID NOs: 920 and 919), wherein the positions correspond to SEQ ID NO: 1. In some embodiments, the polypeptide having protease activity comprises an amino acid sequence having at least 50%, at least 60%, at least 70%, at least 80%, at least 81%, at least 82%, at least 83%, at least 84%, at least 85%, at least 86%, at least 87%, at least 88%, at least 89%, at least 90%, at least 91%, at least 92%, at least 93%, at least 94%, at least 95%, at least 96%, at least 97%, at least 98%, or at least 99% sequence identity to SEQ ID NO: 1, provided that the amino acid sequence comprises mutations of K93D, S128A, D139E, K150E, L153P, N162E, H174E, G199P, N219G, K229E, E241D, I262K, H275Y, R282G, S306P, K324I, F333E, 177_183KEYQSNKdelinsRDNRDN (SEQ ID NOs: 920 and 919), wherein the positions correspond to SEQ ID NO: 1. In some embodiments, the polypeptide having protease activity comprises an amino acid sequence having at least 50%, at least 60%, at least 70%, at least 80%, at least 81%, at least 82%, at least 83%, at least 84%, at least 85%, at least 86%, at least 87%, at least 88%, at least 89%, at least 90%, at least 91%, at least 92%, at least 93%, at least 94%, at least 95%, at least 96%, at least 97%, at least 98%, or at least 99% sequence identity to SEQ ID NO: 1, provided that the amino acid sequence comprises mutations of K93D, S128A, K150E, L153P, N162E, H174E, G199P, N219G, K229E, I262K, H275Y, R282G, S306P, K324I, F333E, A343K, R360L, 177_183KEYQSNKdelinsRDNRDN (SEQ ID NOs: 920 and 919), wherein the positions correspond to SEQ ID NO: 1. In some embodiments, the polypeptide having protease activity comprises an amino acid sequence having at least 50%, at least 60%, at least 70%, at least 80%, at least 81%, at least 82%, at least 83%, at least 84%, at least 85%, at least 86%, at least 87%, at least 88%, at least 89%, at least 90%, at least 91%, at least 92%, at least 93%, at least 94%, at least 95%, at least 96%, at least 97%, at least 98%, or at least 99% sequence identity to SEQ ID NO: 1, provided that the amino acid sequence comprises mutations of K93D, S128A, D139E, K150E, L153P, N162E, H174E, G199P, N219G, K229E, E241D, I262K, H275Y, R282G, S306P, K324I, F333E, A343K, R360L, 177_183KEYQSNKdelinsRDNRDN (SEQ ID NOs: 920 and 919), wherein the positions correspond to SEQ ID NO: 1. In some embodiments, the polypeptide having protease activity comprises an amino acid sequence having at least 50%, at least 60%, at least 70%, at least 80%, at least 81%, at least 82%, at least 83%, at least 84%, at least 85%, at least 86%, at least 87%, at least 88%, at least 89%, at least 90%, at least 91%, at least 92%, at least 93%, at least 94%, at least 95%, at least 96%, at least 97%, at least 98%, or at least 99% sequence identity to SEQ ID NO: 1, provided that the amino acid sequence comprises mutations of S128A, L153P, N162E, H174E, G199P, N219G, K229E, H275Y, Y281S, K324I, F333N, 177_183KEYQSNKdelinsRDNRDN (SEQ ID NOs: 920 and 919), wherein the positions correspond to SEQ ID NO: 1. In some embodiments, the polypeptide having protease activity comprises an amino acid sequence having at least 50%, at least 60%, at least 70%, at least 80%, at least 81%, at least 82%, at least 83%, at least 84%, at least 85%, at least 86%, at least 87%, at least 88%, at least 89%, at least 90%, at least 91%, at least 92%, at least 93%, at least 94%, at least 95%, at least 96%, at least 97%, at least 98%, or at least 99% sequence identity to SEQ ID NO: 1, provided that the amino acid sequence comprises mutations of K93D, S128A, K150E, L153P, N162E, H174E, G199P, N219G, K229E, H275Y, Y281S, K324I, F333N, 177_183KEYQSNKdelinsRDNRDN (SEQ ID NOs: 920 and 919), wherein the positions correspond to SEQ ID NO: 1. In some embodiments, the polypeptide having protease activity comprises an amino acid sequence having at least 50%, at least 60%, at least 70%, at least 80%, at least 81%, at least 82%, at least 83%, at least 84%, at least 85%, at least 86%, at least 87%, at least 88%, at least 89%, at least 90%, at least 91%, at least 92%, at least 93%, at least 94%, at least 95%, at least 96%, at least 97%, at least 98%, or at least 99% sequence identity to SEQ ID NO: 1, provided that the amino acid sequence comprises mutations of S128A, D139E, L153P, N162E, H174E, G199P, N219G, K229E, E241D, H275Y, Y281S, K324I, F333N, 177_183KEYQSNKdelinsRDNRDN (SEQ ID NOs: 920 and 919), wherein the positions correspond to SEQ ID NO: 1. In some embodiments, the polypeptide having protease activity comprises an amino acid sequence having at least 50%, at least 60%, at least 70%, at least 80%, at least 81%, at least 82%, at least 83%, at least 84%, at least 85%, at least 86%, at least 87%, at least 88%, at least 89%, at least 90%, at least 91%, at least 92%, at least 93%, at least 94%, at least 95%, at least 96%, at least 97%, at least 98%, or at least 99% sequence identity to SEQ ID NO: 1, provided that the amino acid sequence comprises mutations of S128A, L153P, N162E, H174E, G199P, N219G, K229E, H275Y, Y281S, K324I, F333N, A343K, R360L, 177_183KEYQSNKdelinsRDNRDN (SEQ ID NOs: 920 and 919), wherein the positions correspond to SEQ ID NO: 1. In some embodiments, the polypeptide having protease activity comprises an amino acid sequence having at least 50%, at least 60%, at least 70%, at least 80%, at least 81%, at least 82%, at least 83%, at least 84%, at least 85%, at least 86%, at least 87%, at least 88%, at least 89%, at least 90%, at least 91%, at least 92%, at least 93%, at least 94%, at least 95%, at least 96%, at least 97%, at least 98%, or at least 99% sequence identity to SEQ ID NO: 1, provided that the amino acid sequence comprises mutations of S128A, D139E, L153P, N162E, H174E, G199P, N219G, K229E, E241D, H275Y, Y281S, K324I, F333N, A343K, R360L, 177_183KEYQSNKdelinsRDNRDN (SEQ ID NOs: 920 and 919), wherein the positions correspond to SEQ ID NO: 1. In some embodiments, the polypeptide having protease activity comprises an amino acid sequence having at least 50%, at least 60%, at least 70%, at least 80%, at least 81%, at least 82%, at least 83%, at least 84%, at least 85%, at least 86%, at least 87%, at least 88%, at least 89%, at least 90%, at least 91%, at least 92%, at least 93%, at least 94%, at least 95%, at least 96%, at least 97%, at least 98%, or at least 99% sequence identity to SEQ ID NO: 1, provided that the amino acid sequence comprises mutations of K93D, S128A, D139E, K150E, L153P, N162E, H174E, G199P, N219G, K229E, E241D, H275Y, Y281S, K324I, F333N, 177_183KEYQSNKdelinsRDNRDN (SEQ ID NOs: 920 and 919), wherein the positions correspond to SEQ ID NO: 1. In some embodiments, the polypeptide having protease activity comprises an amino acid sequence having at least 50%, at least 60%, at least 70%, at least 80%, at least 81%, at least 82%, at least 83%, at least 84%, at least 85%, at least 86%, at least 87%, at least 88%, at least 89%, at least 90%, at least 91%, at least 92%, at least 93%, at least 94%, at least 95%, at least 96%, at least 97%, at least 98%, or at least 99% sequence identity to SEQ ID NO: 1, provided that the amino acid sequence comprises mutations of K93D, S128A, K150E, L153P, N162E, H174E, G199P, N219G, K229E, H275Y, Y281S, K324I, F333N, A343K, R360L, 177_183KEYQSNKdelinsRDNRDN (SEQ ID NOs: 920 and 919), wherein the positions correspond to SEQ ID NO: 1. In some embodiments, the polypeptide having protease activity comprises an amino acid sequence having at least 50%, at least 60%, at least 70%, at least 80%, at least 81%, at least 82%, at least 83%, at least 84%, at least 85%, at least 86%, at least 87%, at least 88%, at least 89%, at least 90%, at least 91%, at least 92%, at least 93%, at least 94%, at least 95%, at least 96%, at least 97%, at least 98%, or at least 99% sequence identity to SEQ ID NO: 1, provided that the amino acid sequence comprises mutations of S128A, L153P, N162E, H174E, G199P, N219G, K229E, I262K, H275Y, Y281S, K324I, F333N, 177_183KEYQSNKdelinsRDNRDN (SEQ ID NOs: 920 and 919), wherein the positions correspond to SEQ ID NO: 1. In some embodiments, the polypeptide having protease activity comprises an amino acid sequence having at least 50%, at least 60%, at least 70%, at least 80%, at least 81%, at least 82%, at least 83%, at least 84%, at least 85%, at least 86%, at least 87%, at least 88%, at least 89%, at least 90%, at least 91%, at least 92%, at least 93%, at least 94%, at least 95%, at least 96%, at least 97%, at least 98%, or at least 99% sequence identity to SEQ ID NO: 1, provided that the amino acid sequence comprises mutations of K93D, S128A, K150E, L153P, N162E, H174E, G199P, N219G, K229E, I262K, H275Y, Y281S, K324I, F333N, 177_183KEYQSNKdelinsRDNRDN (SEQ ID NOs: 920 and 919), wherein the positions correspond to SEQ ID NO: 1. In some embodiments, the polypeptide having protease activity comprises an amino acid sequence having at least 50%, at least 60%, at least 70%, at least 80%, at least 81%, at least 82%, at least 83%, at least 84%, at least 85%, at least 86%, at least 87%, at least 88%, at least 89%, at least 90%, at least 91%, at least 92%, at least 93%, at least 94%, at least 95%, at least 96%, at least 97%, at least 98%, or at least 99% sequence identity to SEQ ID NO: 1, provided that the amino acid sequence comprises mutations of S128A, D139E, L153P, N162E, H174E, G199P, N219G, K229E, E241D, I262K, H275Y, Y281S, K324I, F333N, 177_183KEYQSNKdelinsRDNRDN (SEQ ID NOs: 920 and 919), wherein the positions correspond to SEQ ID NO: 1. In some embodiments, the polypeptide having protease activity comprises an amino acid sequence having at least 50%, at least 60%, at least 70%, at least 80%, at least 81%, at least 82%, at least 83%, at least 84%, at least 85%, at least 86%, at least 87%, at least 88%, at least 89%, at least 90%, at least 91%, at least 92%, at least 93%, at least 94%, at least 95%, at least 96%, at least 97%, at least 98%, or at least 99% sequence identity to SEQ ID NO: 1, provided that the amino acid sequence comprises mutations of S128A, L153P, N162E, H174E, G199P, N219G, K229E, I262K, H275Y, Y281S, K324I, F333N, A343K, R360L, 177_183KEYQSNKdelinsRDNRDN (SEQ ID NOs: 920 and 919), wherein the positions correspond to SEQ ID NO: 1. In some embodiments, the polypeptide having protease activity comprises an amino acid sequence having at least 50%, at least 60%, at least 70%, at least 80%, at least 81%, at least 82%, at least 83%, at least 84%, at least 85%, at least 86%, at least 87%, at least 88%, at least 89%, at least 90%, at least 91%, at least 92%, at least 93%, at least 94%, at least 95%, at least 96%, at least 97%, at least 98%, or at least 99% sequence identity to SEQ ID NO: 1, provided that the amino acid sequence comprises mutations of S128A, D139E, L153P, N162E, H174E, G199P, N219G, K229E, E241D, I262K, H275Y, Y281S, K324I, F333N, A343K, R360L, 177_183KEYQSNKdelinsRDNRDN (SEQ ID NOs: 920 and 919), wherein the positions correspond to SEQ ID NO: 1. In some embodiments, the polypeptide having protease activity comprises an amino acid sequence having at least 50%, at least 60%, at least 70%, at least 80%, at least 81%, at least 82%, at least 83%, at least 84%, at least 85%, at least 86%, at least 87%, at least 88%, at least 89%, at least 90%, at least 91%, at least 92%, at least 93%, at least 94%, at least 95%, at least 96%, at least 97%, at least 98%, or at least 99% sequence identity to SEQ ID NO: 1, provided that the amino acid sequence comprises mutations of K93D, S128A, D139E, K150E, L153P, N162E, H174E, G199P, N219G, K229E, E241D, I262K, H275Y, Y281S, K324I, F333N, 177_183KEYQSNKdelinsRDNRDN (SEQ ID NOs: 920 and 919), wherein the positions correspond to SEQ ID NO: 1. In some embodiments, the polypeptide having protease activity comprises an amino acid sequence having at least 50%, at least 60%, at least 70%, at least 80%, at least 81%, at least 82%, at least 83%, at least 84%, at least 85%, at least 86%, at least 87%, at least 88%, at least 89%, at least 90%, at least 91%, at least 92%, at least 93%, at least 94%, at least 95%, at least 96%, at least 97%, at least 98%, or at least 99% sequence identity to SEQ ID NO: 1, provided that the amino acid sequence comprises mutations of K93D, S128A, K150E, L153P, N162E, H174E, G199P, N219G, K229E, I262K, H275Y, Y281S, K324I, F333N, A343K, R360L, 177_183KEYQSNKdelinsRDNRDN (SEQ ID NOS: 920 and 919), wherein the positions correspond to SEQ ID NO: 1. In some embodiments, the polypeptide having protease activity comprises an amino acid sequence having at least 50%, at least 60%, at least 70%, at least 80%, at least 81%, at least 82%, at least 83%, at least 84%, at least 85%, at least 86%, at least 87%, at least 88%, at least 89%, at least 90%, at least 91%, at least 92%, at least 93%, at least 94%, at least 95%, at least 96%, at least 97%, at least 98%, or at least 99% sequence identity to SEQ ID NO: 1, provided that the amino acid sequence comprises mutations of K93D, S128A, D139E, K150E, L153P, N162E, H174E, G199P, N219G, K229E, E241D, I262K, H275Y, Y281S, S306P, K324I, F333N, 177_183KEYQSNKdelinsRDNRDN (SEQ ID NOs: 920 and 919), wherein the positions correspond to SEQ ID NO: 1. In some embodiments, the polypeptide having protease activity comprises an amino acid sequence having at least 50%, at least 60%, at least 70%, at least 80%, at least 81%, at least 82%, at least 83%, at least 84%, at least 85%, at least 86%, at least 87%, at least 88%, at least 89%, at least 90%, at least 91%, at least 92%, at least 93%, at least 94%, at least 95%, at least 96%, at least 97%, at least 98%, or at least 99% sequence identity to SEQ ID NO: 1, provided that the amino acid sequence comprises mutations of K93D, S128A, K150E, L153P, N162E, H174E, G199P, N219G, K229E, I262K, H275Y, Y281S, S306P, K324I, F333N, A343K, R360L, 177_183KEYQSNKdelinsRDNRDN (SEQ ID NOs: 920 and 919), wherein the positions correspond to SEQ ID NO: 1. In some embodiments, the polypeptide having protease activity comprises an amino acid sequence having at least 50%, at least 60%, at least 70%, at least 80%, at least 81%, at least 82%, at least 83%, at least 84%, at least 85%, at least 86%, at least 87%, at least 88%, at least 89%, at least 90%, at least 91%, at least 92%, at least 93%, at least 94%, at least 95%, at least 96%, at least 97%, at least 98%, or at least 99% sequence identity to SEQ ID NO: 1, provided that the amino acid sequence comprises mutations of K93D, S128A, D139E, K150E, L153P, N162E, H174E, G199P, N219G, K229E, E241D, I262K, H275Y, Y281S, S306P, K324I, F333N, A343K, R360L, 177_183KEYQSNKdelinsRDNRDN (SEQ ID NOs: 920 and 919), wherein the positions correspond to SEQ ID NO: 1. In some embodiments, the polypeptide having protease activity comprises an amino acid sequence having at least 50%, at least 60%, at least 70%, at least 80%, at least 81%, at least 82%, at least 83%, at least 84%, at least 85%, at least 86%, at least 87%, at least 88%, at least 89%, at least 90%, at least 91%, at least 92%, at least 93%, at least 94%, at least 95%, at least 96%, at least 97%, at least 98%, or at least 99% sequence identity to SEQ ID NO: 1, provided that the amino acid sequence comprises mutations of K93D, S128A, K150E, L153P, N162E, H174E, G199P, N219G, K229E, I262K, H275Y, Y281S, K324I, F333E, 177_183KEYQSNKdelinsRDNRDN (SEQ ID NOs: 920 and 919), wherein the positions correspond to SEQ ID NO: 1. In some embodiments, the polypeptide having protease activity comprises an amino acid sequence having at least 50%, at least 60%, at least 70%, at least 80%, at least 81%, at least 82%, at least 83%, at least 84%, at least 85%, at least 86%, at least 87%, at least 88%, at least 89%, at least 90%, at least 91%, at least 92%, at least 93%, at least 94%, at least 95%, at least 96%, at least 97%, at least 98%, or at least 99% sequence identity to SEQ ID NO: 1, provided that the amino acid sequence comprises mutations of K93D, S128A, D139E, K150E, L153P, N162E, H174E, G199P, N219G, K229E, E241D, I262K, H275Y, Y281S, K324I, F333E, 177_183KEYQSNKdelinsRDNRDN (SEQ ID NOs: 920 and 919), wherein the positions correspond to SEQ ID NO: 1. In some embodiments, the polypeptide having protease activity comprises an amino acid sequence having at least 50%, at least 60%, at least 70%, at least 80%, at least 81%, at least 82%, at least 83%, at least 84%, at least 85%, at least 86%, at least 87%, at least 88%, at least 89%, at least 90%, at least 91%, at least 92%, at least 93%, at least 94%, at least 95%, at least 96%, at least 97%, at least 98%, or at least 99% sequence identity to SEQ ID NO: 1, provided that the amino acid sequence comprises mutations of K93D, S128A, D139E, K150E, L153P, N162E, H174E, G199P, N219G, K229E, E241D, I262K, H275Y, Y281S, K324I, F333E, A343K, R360L, 177_183KEYQSNKdelinsRDNRDN (SEQ ID NOs: 920 and 919), wherein the positions correspond to SEQ ID NO: 1. In some embodiments, the polypeptide having protease activity comprises an amino acid sequence having at least 50%, at least 60%, at least 70%, at least 80%, at least 81%, at least 82%, at least 83%, at least 84%, at least 85%, at least 86%, at least 87%, at least 88%, at least 89%, at least 90%, at least 91%, at least 92%, at least 93%, at least 94%, at least 95%, at least 96%, at least 97%, at least 98%, or at least 99% sequence identity to SEQ ID NO: 1, provided that the amino acid sequence comprises mutations of K93D, S128A, D139E, K150E, L153P, N162E, H174E, G199P, N219G, K229E, E241D, 1262K, H275Y, Y281S, S306P, K324I, F333E, 177_183KEYQSNKdelinsRDNRDN (SEQ ID NOs: 920 and 919), wherein the positions correspond to SEQ ID NO: 1. In some embodiments, the polypeptide having protease activity comprises an amino acid sequence having at least 50%, at least 60%, at least 70%, at least 80%, at least 81%, at least 82%, at least 83%, at least 84%, at least 85%, at least 86%, at least 87%, at least 88%, at least 89%, at least 90%, at least 91%, at least 92%, at least 93%, at least 94%, at least 95%, at least 96%, at least 97%, at least 98%, or at least 99% sequence identity to SEQ ID NO: 1, provided that the amino acid sequence comprises mutations of K93D, S128A, K150E, L153P, N162E, H174E, G199P, N219G, K229E, I262K, H275Y, Y281S, S306P, K324I, F333E, A343K, R360L, 177_183KEYQSNKdelinsRDNRDN (SEQ ID NOs: 920 and 919), wherein the positions correspond to SEQ ID NO: 1. In some embodiments, the polypeptide having protease activity comprises an amino acid sequence having at least 50%, at least 60%, at least 70%, at least 80%, at least 81%, at least 82%, at least 83%, at least 84%, at least 85%, at least 86%, at least 87%, at least 88%, at least 89%, at least 90%, at least 91%, at least 92%, at least 93%, at least 94%, at least 95%, at least 96%, at least 97%, at least 98%, or at least 99% sequence identity to SEQ ID NO: 1, provided that the amino acid sequence comprises mutations of K93D, S128A, D139E, K150E, L153P, N162E, H174E, G199P, N219G, K229E, E241D, I262K, H275Y, Y281S, S306P, K324I, F333E, A343K, R360L, 177_183KEYQSNKdelinsRDNRDN (SEQ ID NOs: 920 and 919), wherein the positions correspond to SEQ ID NO: 1. In some embodiments, the polypeptide having protease activity comprises an amino acid sequence having at least 50%, at least 60%, at least 70%, at least 80%, at least 81%, at least 82%, at least 83%, at least 84%, at least 85%, at least 86%, at least 87%, at least 88%, at least 89%, at least 90%, at least 91%, at least 92%, at least 93%, at least 94%, at least 95%, at least 96%, at least 97%, at least 98%, or at least 99% sequence identity to SEQ ID NO: 1, provided that the amino acid sequence comprises mutations of K93D, S128A, K150E, L153P, N162E, H174E, G199P, N219G, K229E, I262K, H275Y, K324I, F333N, 177_183KEYQSNKdelinsRDNRDN (SEQ ID NOs: 920 and 919), wherein the positions correspond to SEQ ID NO: 1. In some embodiments, the polypeptide having protease activity comprises an amino acid sequence having at least 50%, at least 60%, at least 70%, at least 80%, at least 81%, at least 82%, at least 83%, at least 84%, at least 85%, at least 86%, at least 87%, at least 88%, at least 89%, at least 90%, at least 91%, at least 92%, at least 93%, at least 94%, at least 95%, at least 96%, at least 97%, at least 98%, or at least 99% sequence identity to SEQ ID NO: 1, provided that the amino acid sequence comprises mutations of S128A, D139E, L153P, N162E, H174E, G199P, N219G, K229E, E241D, I262K, H275Y, K324I, F333N, 177_183KEYQSNKdelinsRDNRDN (SEQ ID NOs: 920 and 919), wherein the positions correspond to SEQ ID NO: 1. In some embodiments, the polypeptide having protease activity comprises an amino acid sequence having at least 50%, at least 60%, at least 70%, at least 80%, at least 81%, at least 82%, at least 83%, at least 84%, at least 85%, at least 86%, at least 87%, at least 88%, at least 89%, at least 90%, at least 91%, at least 92%, at least 93%, at least 94%, at least 95%, at least 96%, at least 97%, at least 98%, or at least 99% sequence identity to SEQ ID NO: 1, provided that the amino acid sequence comprises mutations of S128A, L153P, N162E, H174E, G199P, N219G, K229E, I262K, H275Y, K324I, F333N, A343K, R360L, 177_183KEYQSNKdelinsRDNRDN (SEQ ID NOs: 920 and 919), wherein the positions correspond to SEQ ID NO: 1. In some embodiments, the polypeptide having protease activity comprises an amino acid sequence having at least 50%, at least 60%, at least 70%, at least 80%, at least 81%, at least 82%, at least 83%, at least 84%, at least 85%, at least 86%, at least 87%, at least 88%, at least 89%, at least 90%, at least 91%, at least 92%, at least 93%, at least 94%, at least 95%, at least 96%, at least 97%, at least 98%, or at least 99% sequence identity to SEQ ID NO: 1, provided that the amino acid sequence comprises mutations of S128A, D139E, L153P, N162E, H174E, G199P, N219G, K229E, E241D, I262K, H275Y, K324I, F333N, A343K, R360L, 177_183KEYQSNKdelinsRDNRDN (SEQ ID NOs: 920 and 919), wherein the positions correspond to SEQ ID NO: 1. In some embodiments, the polypeptide having protease activity comprises an amino acid sequence having at least 50%, at least 60%, at least 70%, at least 80%, at least 81%, at least 82%, at least 83%, at least 84%, at least 85%, at least 86%, at least 87%, at least 88%, at least 89%, at least 90%, at least 91%, at least 92%, at least 93%, at least 94%, at least 95%, at least 96%, at least 97%, at least 98%, or at least 99% sequence identity to SEQ ID NO: 1, provided that the amino acid sequence comprises mutations of K93D, S128A, D139E, K150E, L153P, N162E, H174E, G199P, N219G, K229E, E241D, I262K, H275Y, K324I, F333N, 177_183KEYQSNKdelinsRDNRDN (SEQ ID NOs: 920 and 919), wherein the positions correspond to SEQ ID NO: 1. In some embodiments, the polypeptide having protease activity comprises an amino acid sequence having at least 50%, at least 60%, at least 70%, at least 80%, at least 81%, at least 82%, at least 83%, at least 84%, at least 85%, at least 86%, at least 87%, at least 88%, at least 89%, at least 90%, at least 91%, at least 92%, at least 93%, at least 94%, at least 95%, at least 96%, at least 97%, at least 98%, or at least 99% sequence identity to SEQ ID NO: 1, provided that the amino acid sequence comprises mutations of K93D, S128A, K150E, L153P, N162E, H174E, G199P, N219G, K229E, I262K, H275Y, K324I, F333N, A343K, R360L, 177_183KEYQSNKdelinsRDNRDN (SEQ ID NOs: 920 and 919), wherein the positions correspond to SEQ ID NO: 1. In some embodiments, the polypeptide having protease activity comprises an amino acid sequence having at least 50%, at least 60%, at least 70%, at least 80%, at least 81%, at least 82%, at least 83%, at least 84%, at least 85%, at least 86%, at least 87%, at least 88%, at least 89%, at least 90%, at least 91%, at least 92%, at least 93%, at least 94%, at least 95%, at least 96%, at least 97%, at least 98%, or at least 99% sequence identity to SEQ ID NO: 1, provided that the amino acid sequence comprises mutations of K93D, S128A, D139E, K150E, L153P, N162E, H174E, G199P, N219G, K229E, E241D, I262K, H275Y, S306P, K324I, F333N, 177_183KEYQSNKdelinsRDNRDN (SEQ ID NOs: 920 and 919), wherein the positions correspond to SEQ ID NO: 1. In some embodiments, the polypeptide having protease activity comprises an amino acid sequence having at least 50%, at least 60%, at least 70%, at least 80%, at least 81%, at least 82%, at least 83%, at least 84%, at least 85%, at least 86%, at least 87%, at least 88%, at least 89%, at least 90%, at least 91%, at least 92%, at least 93%, at least 94%, at least 95%, at least 96%, at least 97%, at least 98%, or at least 99% sequence identity to SEQ ID NO: 1, provided that the amino acid sequence comprises mutations of K93D, S128A, K150E, L153P, N162E, H174E, G199P, N219G, K229E, I262K, H275Y, S306P, K324I, F333N, A343K, R360L, 177_183KEYQSNKdelinsRDNRDN (SEQ ID NOs: 920 and 919), wherein the positions correspond to SEQ ID NO: 1. In some embodiments, the polypeptide having protease activity comprises an amino acid sequence having at least 50%, at least 60%, at least 70%, at least 80%, at least 81%, at least 82%, at least 83%, at least 84%, at least 85%, at least 86%, at least 87%, at least 88%, at least 89%, at least 90%, at least 91%, at least 92%, at least 93%, at least 94%, at least 95%, at least 96%, at least 97%, at least 98%, or at least 99% sequence identity to SEQ ID NO: 1, provided that the amino acid sequence comprises mutations of K93D, S128A, D139E, K150E, L153P, N162E, H174E, G199P, N219G, K229E, E241D, I262K, H275Y, S306P, K324I, F333N, A343K, R360L, 177_183KEYQSNKdelinsRDNRDN (SEQ ID NOs: 920 and 919), wherein the positions correspond to SEQ ID NO: 1. In some embodiments, the polypeptide having protease activity comprises an amino acid sequence having at least 50%, at least 60%, at least 70%, at least 80%, at least 81%, at least 82%, at least 83%, at least 84%, at least 85%, at least 86%, at least 87%, at least 88%, at least 89%, at least 90%, at least 91%, at least 92%, at least 93%, at least 94%, at least 95%, at least 96%, at least 97%, at least 98%, or at least 99% sequence identity to SEQ ID NO: 1, provided that the amino acid sequence comprises mutations of K93D, S128A, K150E, L153P, N162E, H174E, G199P, N219G, K229E, I262K, H275Y, K324I, F333E, 177_183KEYQSNKdelinsRDNRDN (SEQ ID NOs: 920 and 919), wherein the positions correspond to SEQ ID NO: 1. In some embodiments, the polypeptide having protease activity comprises an amino acid sequence having at least 50%, at least 60%, at least 70%, at least 80%, at least 81%, at least 82%, at least 83%, at least 84%, at least 85%, at least 86%, at least 87%, at least 88%, at least 89%, at least 90%, at least 91%, at least 92%, at least 93%, at least 94%, at least 95%, at least 96%, at least 97%, at least 98%, or at least 99% sequence identity to SEQ ID NO: 1, provided that the amino acid sequence comprises mutations of K93D, S128A, D139E, K150E, L153P, N162E, H174E, G199P, N219G, K229E, E241D, I262K, H275Y, K324I, F333E, 177_183KEYQSNKdelinsRDNRDN (SEQ ID NOs: 920 and 919), wherein the positions correspond to SEQ ID NO: 1. In some embodiments, the polypeptide having protease activity comprises an amino acid sequence having at least 50%, at least 60%, at least 70%, at least 80%, at least 81%, at least 82%, at least 83%, at least 84%, at least 85%, at least 86%, at least 87%, at least 88%, at least 89%, at least 90%, at least 91%, at least 92%, at least 93%, at least 94%, at least 95%, at least 96%, at least 97%, at least 98%, or at least 99% sequence identity to SEQ ID NO: 1, provided that the amino acid sequence comprises mutations of K93D, S128A, D139E, K150E, L153P, N162E, H174E, G199P, N219G, K229E, E241D, I262K, H275Y, K324I, F333E, A343K, R360L, 177_183KEYQSNKdelinsRDNRDN (SEQ ID NOs: 920 and 919), wherein the positions correspond to SEQ ID NO: 1. In some embodiments, the polypeptide having protease activity comprises an amino acid sequence having at least 50%, at least 60%, at least 70%, at least 80%, at least 81%, at least 82%, at least 83%, at least 84%, at least 85%, at least 86%, at least 87%, at least 88%, at least 89%, at least 90%, at least 91%, at least 92%, at least 93%, at least 94%, at least 95%, at least 96%, at least 97%, at least 98%, or at least 99% sequence identity to SEQ ID NO: 1, provided that the amino acid sequence comprises mutations of K93D, S128A, D139E, K150E, L153P, N162E, H174E, G199P, N219G, K229E, E241D, I262K, H275Y, S306P, K324I, F333E, 177_183KEYQSNKdelinsRDNRDN (SEQ ID NOs: 920 and 919), wherein the positions correspond to SEQ ID NO: 1. In some embodiments, the polypeptide having protease activity comprises an amino acid sequence having at least 50%, at least 60%, at least 70%, at least 80%, at least 81%, at least 82%, at least 83%, at least 84%, at least 85%, at least 86%, at least 87%, at least 88%, at least 89%, at least 90%, at least 91%, at least 92%, at least 93%, at least 94%, at least 95%, at least 96%, at least 97%, at least 98%, or at least 99% sequence identity to SEQ ID NO: 1, provided that the amino acid sequence comprises mutations of K93D, S128A, K150E, L153P, N162E, H174E, G199P, N219G, K229E, I262K, H275Y, S306P, K324I, F333E, A343K, R360L, 177_183KEYQSNKdelinsRDNRDN (SEQ ID NOs: 920 and 919), wherein the positions correspond to SEQ ID NO: 1. In some embodiments, the polypeptide having protease activity comprises an amino acid sequence having at least 50%, at least 60%, at least 70%, at least 80%, at least 81%, at least 82%, at least 83%, at least 84%, at least 85%, at least 86%, at least 87%, at least 88%, at least 89%, at least 90%, at least 91%, at least 92%, at least 93%, at least 94%, at least 95%, at least 96%, at least 97%, at least 98%, or at least 99% sequence identity to SEQ ID NO: 1, provided that the amino acid sequence comprises mutations of K93D, S128A, D139E, K150E, L153P, N162E, H174E, G199P, N219G, K229E, E241D, I262K, H275Y, S306P, K324I, F333E, A343K, R360L, 177_183KEYQSNKdelinsRDNRDN (SEQ ID NOs: 920 and 919), wherein the positions correspond to SEQ ID NO: 1. In some embodiments, the polypeptide having protease activity comprises an amino acid sequence having at least 50%, at least 60%, at least 70%, at least 80%, at least 81%, at least 82%, at least 83%, at least 84%, at least 85%, at least 86%, at least 87%, at least 88%, at least 89%, at least 90%, at least 91%, at least 92%, at least 93%, at least 94%, at least 95%, at least 96%, at least 97%, at least 98%, or at least 99% sequence identity to SEQ ID NO: 1, provided that the amino acid sequence comprises mutations of S128A, L153P, N162E, H174E, H197D, N219G, K229E, I262K, H275Y, K324I, F333N, 177_183KEYQSNKdelinsRDNRDN (SEQ ID NOs: 920 and 919), wherein the positions correspond to SEQ ID NO: 1. In some embodiments, the polypeptide having protease activity comprises an amino acid sequence having at least 50%, at least 60%, at least 70%, at least 80%, at least 81%, at least 82%, at least 83%, at least 84%, at least 85%, at least 86%, at least 87%, at least 88%, at least 89%, at least 90%, at least 91%, at least 92%, at least 93%, at least 94%, at least 95%, at least 96%, at least 97%, at least 98%, or at least 99% sequence identity to SEQ ID NO: 1, provided that the amino acid sequence comprises mutations of K93D, S128A, K150E, L153P, N162E, H174E, H197D, N219G, K229E, I262K, H275Y, K324I, F333N, 177_183KEYQSNKdelinsRDNRDN (SEQ ID NOs: 920 and 919), wherein the positions correspond to SEQ ID NO: 1. In some embodiments, the polypeptide having protease activity comprises an amino acid sequence having at least 50%, at least 60%, at least 70%, at least 80%, at least 81%, at least 82%, at least 83%, at least 84%, at least 85%, at least 86%, at least 87%, at least 88%, at least 89%, at least 90%, at least 91%, at least 92%, at least 93%, at least 94%, at least 95%, at least 96%, at least 97%, at least 98%, or at least 99% sequence identity to SEQ ID NO: 1, provided that the amino acid sequence comprises mutations of S128A, D139E, L153P, N162E, H174E, H197D, N219G, K229E, E241D, I262K, H275Y, K324I, F333N, 177_183KEYQSNKdelinsRDNRDN (SEQ ID NOs: 920 and 919), wherein the positions correspond to SEQ ID NO: 1. In some embodiments, the polypeptide having protease activity comprises an amino acid sequence having at least 50%, at least 60%, at least 70%, at least 80%, at least 81%, at least 82%, at least 83%, at least 84%, at least 85%, at least 86%, at least 87%, at least 88%, at least 89%, at least 90%, at least 91%, at least 92%, at least 93%, at least 94%, at least 95%, at least 96%, at least 97%, at least 98%, or at least 99% sequence identity to SEQ ID NO: 1, provided that the amino acid sequence comprises mutations of S128A, L153P, N162E, H174E, H197D, N219G, K229E, I262K, H275Y, K324I, F333N, A343K, R360L, 177_183KEYQSNKdelinsRDNRDN (SEQ ID NOs: 920 and 919), wherein the positions correspond to SEQ ID NO: 1. In some embodiments, the polypeptide having protease activity comprises an amino acid sequence having at least 50%, at least 60%, at least 70%, at least 80%, at least 81%, at least 82%, at least 83%, at least 84%, at least 85%, at least 86%, at least 87%, at least 88%, at least 89%, at least 90%, at least 91%, at least 92%, at least 93%, at least 94%, at least 95%, at least 96%, at least 97%, at least 98%, or at least 99% sequence identity to SEQ ID NO: 1, provided that the amino acid sequence comprises mutations of S128A, D139E, L153P, N162E, H174E, H197D, N219G, K229E, E241D, I262K, H275Y, K324I, F333N, A343K, R360L, 177_183KEYQSNKdelinsRDNRDN (SEQ ID NOs: 920 and 919), wherein the positions correspond to SEQ ID NO: 1. In some embodiments, the polypeptide having protease activity comprises an amino acid sequence having at least 50%, at least 60%, at least 70%, at least 80%, at least 81%, at least 82%, at least 83%, at least 84%, at least 85%, at least 86%, at least 87%, at least 88%, at least 89%, at least 90%, at least 91%, at least 92%, at least 93%, at least 94%, at least 95%, at least 96%, at least 97%, at least 98%, or at least 99% sequence identity to SEQ ID NO: 1, provided that the amino acid sequence comprises mutations of K93D, S128A, D139E, K150E, L153P, N162E, H174E, H197D, N219G, K229E, E241D, I262K, H275Y, K324I, F333N, 177_183KEYQSNKdelinsRDNRDN (SEQ ID NOs: 920 and 919), wherein the positions correspond to SEQ ID NO: 1. In some embodiments, the polypeptide having protease activity comprises an amino acid sequence having at least 50%, at least 60%, at least 70%, at least 80%, at least 81%, at least 82%, at least 83%, at least 84%, at least 85%, at least 86%, at least 87%, at least 88%, at least 89%, at least 90%, at least 91%, at least 92%, at least 93%, at least 94%, at least 95%, at least 96%, at least 97%, at least 98%, or at least 99% sequence identity to SEQ ID NO: 1, provided that the amino acid sequence comprises mutations of K93D, S128A, K150E, L153P, N162E, H174E, H197D, N219G, K229E, I262K, H275Y, K324I, F333N, A343K, R360L, 177_183KEYQSNKdelinsRDNRDN (SEQ ID NOs: 920 and 919), wherein the positions correspond to SEQ ID NO: 1. In some embodiments, the polypeptide having protease activity comprises an amino acid sequence having at least 50%, at least 60%, at least 70%, at least 80%, at least 81%, at least 82%, at least 83%, at least 84%, at least 85%, at least 86%, at least 87%, at least 88%, at least 89%, at least 90%, at least 91%, at least 92%, at least 93%, at least 94%, at least 95%, at least 96%, at least 97%, at least 98%, or at least 99% sequence identity to SEQ ID NO: 1, provided that the amino acid sequence comprises mutations of K93D, S128A, D139E, K150E, L153P, N162E, H174E, H197D, N219G, K229E, E241D, I262K, H275Y, S306P, K324I, F333N, 177_183KEYQSNKdelinsRDNRDN (SEQ ID NOs: 920 and 919), wherein the positions correspond to SEQ ID NO: 1. In some embodiments, the polypeptide having protease activity comprises an amino acid sequence having at least 50%, at least 60%, at least 70%, at least 80%, at least 81%, at least 82%, at least 83%, at least 84%, at least 85%, at least 86%, at least 87%, at least 88%, at least 89%, at least 90%, at least 91%, at least 92%, at least 93%, at least 94%, at least 95%, at least 96%, at least 97%, at least 98%, or at least 99% sequence identity to SEQ ID NO: 1, provided that the amino acid sequence comprises mutations of K93D, S128A, K150E, L153P, N162E, H174E, H197D, N219G, K229E, I262K, H275Y, S306P, K324I, F333N, A343K, R360L, 177_183KEYQSNKdelinsRDNRDN (SEQ ID NOs: 920 and 919), wherein the positions correspond to SEQ ID NO: 1. In some embodiments, the polypeptide having protease activity comprises an amino acid sequence having at least 50%, at least 60%, at least 70%, at least 80%, at least 81%, at least 82%, at least 83%, at least 84%, at least 85%, at least 86%, at least 87%, at least 88%, at least 89%, at least 90%, at least 91%, at least 92%, at least 93%, at least 94%, at least 95%, at least 96%, at least 97%, at least 98%, or at least 99% sequence identity to SEQ ID NO: 1, provided that the amino acid sequence comprises mutations of K93D, S128A, D139E, K150E, L153P, N162E, H174E, H197D, N219G, K229E, E241D, I262K, H275Y, S306P, K324I, F333N, A343K, R360L, 177_183KEYQSNKdelinsRDNRDN (SEQ ID NOs: 920 and 919), wherein the positions correspond to SEQ ID NO: 1. In some embodiments, the polypeptide having protease activity comprises an amino acid sequence having at least 50%, at least 60%, at least 70%, at least 80%, at least 81%, at least 82%, at least 83%, at least 84%, at least 85%, at least 86%, at least 87%, at least 88%, at least 89%, at least 90%, at least 91%, at least 92%, at least 93%, at least 94%, at least 95%, at least 96%, at least 97%, at least 98%, or at least 99% sequence identity to SEQ ID NO: 1, provided that the amino acid sequence comprises mutations of K93D, S128A, K150E, L153P, N162E, H174E, H197D, N219G, K229E, I262K, H275Y, K324I, F333E, 177_183KEYQSNKdelinsRDNRDN (SEQ ID NOs: 920 and 919), wherein the positions correspond to SEQ ID NO: 1. In some embodiments, the polypeptide having protease activity comprises an amino acid sequence having at least 50%, at least 60%, at least 70%, at least 80%, at least 81%, at least 82%, at least 83%, at least 84%, at least 85%, at least 86%, at least 87%, at least 88%, at least 89%, at least 90%, at least 91%, at least 92%, at least 93%, at least 94%, at least 95%, at least 96%, at least 97%, at least 98%, or at least 99% sequence identity to SEQ ID NO: 1, provided that the amino acid sequence comprises mutations of K93D, S128A, D139E, K150E, L153P, N162E, H174E, H197D, N219G, K229E, E241D, I262K, H275Y, K324I, F333E, 177_183KEYQSNKdelinsRDNRDN (SEQ ID NOs: 920 and 919), wherein the positions correspond to SEQ ID NO: 1. In some embodiments, the polypeptide having protease activity comprises an amino acid sequence having at least 50%, at least 60%, at least 70%, at least 80%, at least 81%, at least 82%, at least 83%, at least 84%, at least 85%, at least 86%, at least 87%, at least 88%, at least 89%, at least 90%, at least 91%, at least 92%, at least 93%, at least 94%, at least 95%, at least 96%, at least 97%, at least 98%, or at least 99% sequence identity to SEQ ID NO: 1, provided that the amino acid sequence comprises mutations of K93D, S128A, D139E, K150E, L153P, N162E, H174E, H197D, N219G, K229E, E241D, I262K, H275Y, K324I, F333E, A343K, R360L, 177_183KEYQSNKdelinsRDNRDN (SEQ ID NOs: 920 and 919), wherein the positions correspond to SEQ ID NO: 1. In some embodiments, the polypeptide having protease activity comprises an amino acid sequence having at least 50%, at least 60%, at least 70%, at least 80%, at least 81%, at least 82%, at least 83%, at least 84%, at least 85%, at least 86%, at least 87%, at least 88%, at least 89%, at least 90%, at least 91%, at least 92%, at least 93%, at least 94%, at least 95%, at least 96%, at least 97%, at least 98%, or at least 99% sequence identity to SEQ ID NO: 1, provided that the amino acid sequence comprises mutations of K93D, S128A, D139E, K150E, L153P, N162E, H174E, H197D, N219G, K229E, E241D, I262K, H275Y, S306P, K324I, F333E, 177_183KEYQSNKdelinsRDNRDN (SEQ ID NOs: 920 and 919), wherein the positions correspond to SEQ ID NO: 1. In some embodiments, the polypeptide having protease activity comprises an amino acid sequence having at least 50%, at least 60%, at least 70%, at least 80%, at least 81%, at least 82%, at least 83%, at least 84%, at least 85%, at least 86%, at least 87%, at least 88%, at least 89%, at least 90%, at least 91%, at least 92%, at least 93%, at least 94%, at least 95%, at least 96%, at least 97%, at least 98%, or at least 99% sequence identity to SEQ ID NO: 1, provided that the amino acid sequence comprises mutations of K93D, S128A, K150E, L153P, N162E, H174E, H197D, N219G, K229E, I262K, H275Y, S306P, K324I, F333E, A343K, R360L, 177_183KEYQSNKdelinsRDNRDN (SEQ ID NOs: 920 and 919), wherein the positions correspond to SEQ ID NO: 1. In some embodiments, the polypeptide having protease activity comprises an amino acid sequence having at least 50%, at least 60%, at least 70%, at least 80%, at least 81%, at least 82%, at least 83%, at least 84%, at least 85%, at least 86%, at least 87%, at least 88%, at least 89%, at least 90%, at least 91%, at least 92%, at least 93%, at least 94%, at least 95%, at least 96%, at least 97%, at least 98%, or at least 99% sequence identity to SEQ ID NO: 1, provided that the amino acid sequence comprises mutations of K93D, S128A, D139E, K150E, L153P, N162E, H174E, H197D, N219G, K229E, E241D, I262K, H275Y, S306P, K324I, F333E, A343K, R360L, 177_183KEYQSNKdelinsRDNRDN (SEQ ID NOs: 920 and 919), wherein the positions correspond to SEQ ID NO: 1. In some embodiments, the polypeptide having protease activity comprises an amino acid sequence having at least 50%, at least 60%, at least 70%, at least 80%, at least 81%, at least 82%, at least 83%, at least 84%, at least 85%, at least 86%, at least 87%, at least 88%, at least 89%, at least 90%, at least 91%, at least 92%, at least 93%, at least 94%, at least 95%, at least 96%, at least 97%, at least 98%, or at least 99% sequence identity to SEQ ID NO: 1, provided that the amino acid sequence comprises mutations of K93D, S128A, K150E, L153P, N162E, H174E, G199P, N219G, K229E, H275Y, K324I, F333N, 177_183KEYQSNKdelinsRDNRDN (SEQ ID NOs: 920 and 919), wherein the positions correspond to SEQ ID NO: 1. In some embodiments, the polypeptide having protease activity comprises an amino acid sequence having at least 50%, at least 60%, at least 70%, at least 80%, at least 81%, at least 82%, at least 83%, at least 84%, at least 85%, at least 86%, at least 87%, at least 88%, at least 89%, at least 90%, at least 91%, at least 92%, at least 93%, at least 94%, at least 95%, at least 96%, at least 97%, at least 98%, or at least 99% sequence identity to SEQ ID NO: 1, provided that the amino acid sequence comprises mutations of S128A, D139E, L153P, N162E, H174E, G199P, N219G, K229E, E241D, H275Y, K324I, F333N, 177_183KEYQSNKdelinsRDNRDN (SEQ ID NOs: 920 and 919), wherein the positions correspond to SEQ ID NO: 1. In some embodiments, the polypeptide having protease activity comprises an amino acid sequence having at least 50%, at least 60%, at least 70%, at least 80%, at least 81%, at least 82%, at least 83%, at least 84%, at least 85%, at least 86%, at least 87%, at least 88%, at least 89%, at least 90%, at least 91%, at least 92%, at least 93%, at least 94%, at least 95%, at least 96%, at least 97%, at least 98%, or at least 99% sequence identity to SEQ ID NO: 1, provided that the amino acid sequence comprises mutations of S128A, L153P, N162E, H174E, G199P, N219G, K229E, H275Y, K324I, F333N, A343K, R360L, 177_183KEYQSNKdelinsRDNRDN (SEQ ID NOs: 920 and 919), wherein the positions correspond to SEQ ID NO: 1. In some embodiments, the polypeptide having protease activity comprises an amino acid sequence having at least 50%, at least 60%, at least 70%, at least 80%, at least 81%, at least 82%, at least 83%, at least 84%, at least 85%, at least 86%, at least 87%, at least 88%, at least 89%, at least 90%, at least 91%, at least 92%, at least 93%, at least 94%, at least 95%, at least 96%, at least 97%, at least 98%, or at least 99% sequence identity to SEQ ID NO: 1, provided that the amino acid sequence comprises mutations of S128A, D139E, L153P, N162E, H174E, G199P, N219G, K229E, E241D, H275Y, K324I, F333N, A343K, R360L, 177_183KEYQSNKdelinsRDNRDN (SEQ ID NOs: 920 and 919), wherein the positions correspond to SEQ ID NO: 1. In some embodiments, the polypeptide having protease activity comprises an amino acid sequence having at least 50%, at least 60%, at least 70%, at least 80%, at least 81%, at least 82%, at least 83%, at least 84%, at least 85%, at least 86%, at least 87%, at least 88%, at least 89%, at least 90%, at least 91%, at least 92%, at least 93%, at least 94%, at least 95%, at least 96%, at least 97%, at least 98%, or at least 99% sequence identity to SEQ ID NO: 1, provided that the amino acid sequence comprises mutations of K93D, S128A, D139E, K150E, L153P, N162E, H174E, G199P, N219G, K229E, E241D, H275Y, K324I, F333N, 177_183KEYQSNKdelinsRDNRDN (SEQ ID NOs: 920 and 919), wherein the positions correspond to SEQ ID NO: 1. In some embodiments, the polypeptide having protease activity comprises an amino acid sequence having at least 50%, at least 60%, at least 70%, at least 80%, at least 81%, at least 82%, at least 83%, at least 84%, at least 85%, at least 86%, at least 87%, at least 88%, at least 89%, at least 90%, at least 91%, at least 92%, at least 93%, at least 94%, at least 95%, at least 96%, at least 97%, at least 98%, or at least 99% sequence identity to SEQ ID NO: 1, provided that the amino acid sequence comprises mutations of K93D, S128A, K150E, L153P, N162E, H174E, G199P, N219G, K229E, H275Y, K324I, F333N, A343K, R360L, 177_183KEYQSNKdelinsRDNRDN (SEQ ID NOs: 920 and 919), wherein the positions correspond to SEQ ID NO: 1. In some embodiments, the polypeptide having protease activity comprises an amino acid sequence having at least 50%, at least 60%, at least 70%, at least 80%, at least 81%, at least 82%, at least 83%, at least 84%, at least 85%, at least 86%, at least 87%, at least 88%, at least 89%, at least 90%, at least 91%, at least 92%, at least 93%, at least 94%, at least 95%, at least 96%, at least 97%, at least 98%, or at least 99% sequence identity to SEQ ID NO: 1, provided that the amino acid sequence comprises mutations of S128A, D139E, L153P, N162E, N219G, K229E, H275Y, K324I, F333N, 177_183KEYQSNKdelinsRDNRDN (SEQ ID NOs: 920 and 919), wherein the positions correspond to SEQ ID NO: 1. In some embodiments, the polypeptide having protease activity comprises an amino acid sequence having at least 50%, at least 60%, at least 70%, at least 80%, at least 81%, at least 82%, at least 83%, at least 84%, at least 85%, at least 86%, at least 87%, at least 88%, at least 89%, at least 90%, at least 91%, at least 92%, at least 93%, at least 94%, at least 95%, at least 96%, at least 97%, at least 98%, or at least 99% sequence identity to SEQ ID NO: 1, provided that the amino acid sequence comprises mutations of S128A, L153P, N162E, N219G, K229E, E241D, H275Y, K324I, F333N, 177_183KEYQSNKdelinsRDNRDN (SEQ ID NOs: 920 and 919), wherein the positions correspond to SEQ ID NO: 1. In some embodiments, the polypeptide having protease activity comprises an amino acid sequence having at least 50%, at least 60%, at least 70%, at least 80%, at least 81%, at least 82%, at least 83%, at least 84%, at least 85%, at least 86%, at least 87%, at least 88%, at least 89%, at least 90%, at least 91%, at least 92%, at least 93%, at least 94%, at least 95%, at least 96%, at least 97%, at least 98%, or at least 99% sequence identity to SEQ ID NO: 1, provided that the amino acid sequence comprises mutations of S128A, L153P, N162E, N219G, K229E, H275Y, K324I, F333N, A343K, 177_183KEYQSNKdelinsRDNRDN (SEQ ID NOs: 920 and 919), wherein the positions correspond to SEQ ID NO: 1. In some embodiments, the polypeptide having protease activity comprises an amino acid sequence having at least 50%, at least 60%, at least 70%, at least 80%, at least 81%, at least 82%, at least 83%, at least 84%, at least 85%, at least 86%, at least 87%, at least 88%, at least 89%, at least 90%, at least 91%, at least 92%, at least 93%, at least 94%, at least 95%, at least 96%, at least 97%, at least 98%, or at least 99% sequence identity to SEQ ID NO: 1, provided that the amino acid sequence comprises mutations of S128A, L153P, N162E, N219G, K229E, H275Y, K324I, F333E, 177_183KEYQSNKdelinsRDNRDN (SEQ ID NOs: 920 and 919), wherein the positions correspond to SEQ ID NO: 1. In some embodiments, the polypeptide having protease activity comprises an amino acid sequence having at least 50%, at least 60%, at least 70%, at least 80%, at least 81%, at least 82%, at least 83%, at least 84%, at least 85%, at least 86%, at least 87%, at least 88%, at least 89%, at least 90%, at least 91%, at least 92%, at least 93%, at least 94%, at least 95%, at least 96%, at least 97%, at least 98%, or at least 99% sequence identity to SEQ ID NO: 1, provided that the amino acid sequence comprises mutations of S128A, L153P, N162E, N219G, K229E, H275Y, R282G, K324I, F333N, 177_183KEYQSNKdelinsRDNRDN (SEQ ID NOs: 920 and 919), wherein the positions correspond to SEQ ID NO: 1. In some embodiments, the polypeptide having protease activity comprises an amino acid sequence having at least 50%, at least 60%, at least 70%, at least 80%, at least 81%, at least 82%, at least 83%, at least 84%, at least 85%, at least 86%, at least 87%, at least 88%, at least 89%, at least 90%, at least 91%, at least 92%, at least 93%, at least 94%, at least 95%, at least 96%, at least 97%, at least 98%, or at least 99% sequence identity to SEQ ID NO: 1, provided that the amino acid sequence comprises mutations of S128A, L153P, N162E, H197D, N219G, K229E, H275Y, K324I, F333N, 177_183KEYQSNKdelinsRDNRDN (SEQ ID NOs: 920 and 919), wherein the positions correspond to SEQ ID NO: 1. In some embodiments, the polypeptide having protease activity comprises an amino acid sequence having at least 50%, at least 60%, at least 70%, at least 80%, at least 81%, at least 82%, at least 83%, at least 84%, at least 85%, at least 86%, at least 87%, at least 88%, at least 89%, at least 90%, at least 91%, at least 92%, at least 93%, at least 94%, at least 95%, at least 96%, at least 97%, at least 98%, or at least 99% sequence identity to SEQ ID NO: 1, provided that the amino acid sequence comprises mutations of S128A, L153P, N162E, N219G, K229E, H275Y, K324I, F333N, R360L, 177_183KEYQSNKdelinsRDNRDN (SEQ ID NOs: 920 and 919), wherein the positions correspond to SEQ ID NO: 1. In some embodiments, the polypeptide having protease activity comprises an amino acid sequence having at least 50%, at least 60%, at least 70%, at least 80%, at least 81%, at least 82%, at least 83%, at least 84%, at least 85%, at least 86%, at least 87%, at least 88%, at least 89%, at least 90%, at least 91%, at least 92%, at least 93%, at least 94%, at least 95%, at least 96%, at least 97%, at least 98%, or at least 99% sequence identity to SEQ ID NO: 1, provided that the amino acid sequence comprises mutations of S128A, L153P, N162E, N219G, K229E, I262K, H275Y, K324I, F333N, 177_183KEYQSNKdelinsRDNRDN (SEQ ID NOs: 920 and 919), wherein the positions correspond to SEQ ID NO: 1. In some embodiments, the polypeptide having protease activity comprises an amino acid sequence having at least 50%, at least 60%, at least 70%, at least 80%, at least 81%, at least 82%, at least 83%, at least 84%, at least 85%, at least 86%, at least 87%, at least 88%, at least 89%, at least 90%, at least 91%, at least 92%, at least 93%, at least 94%, at least 95%, at least 96%, at least 97%, at least 98%, or at least 99% sequence identity to SEQ ID NO: 1, provided that the amino acid sequence comprises mutations of S128A, L153P, N162E, G199P, N219G, K229E, H275Y, K324I, F333N, 177_183KEYQSNKdelinsRDNRDN (SEQ ID NOs: 920 and 919), wherein the positions correspond to SEQ ID NO: 1. In some embodiments, the polypeptide having protease activity comprises an amino acid sequence having at least 50%, at least 60%, at least 70%, at least 80%, at least 81%, at least 82%, at least 83%, at least 84%, at least 85%, at least 86%, at least 87%, at least 88%, at least 89%, at least 90%, at least 91%, at least 92%, at least 93%, at least 94%, at least 95%, at least 96%, at least 97%, at least 98%, or at least 99% sequence identity to SEQ ID NO: 1, provided that the amino acid sequence comprises mutations of S128A, L153P, N162E, N219G, K229E, H275Y, Y281S, K324I, F333N, 177_183KEYQSNKdelinsRDNRDN (SEQ ID NOs: 920 and 919), wherein the positions correspond to SEQ ID NO: 1. In some embodiments, the polypeptide having protease activity comprises an amino acid sequence having at least 50%, at least 60%, at least 70%, at least 80%, at least 81%, at least 82%, at least 83%, at least 84%, at least 85%, at least 86%, at least 87%, at least 88%, at least 89%, at least 90%, at least 91%, at least 92%, at least 93%, at least 94%, at least 95%, at least 96%, at least 97%, at least 98%, or at least 99% sequence identity to SEQ ID NO: 1, provided that the amino acid sequence comprises mutations of K93D, S128A, L153P, N162E, N219G, K229E, H275Y, K324I, F333N, 177_183KEYQSNKdelinsRDNRDN (SEQ ID NOs: 920 and 919), wherein the positions correspond to SEQ ID NO: 1. In some embodiments, the polypeptide having protease activity comprises an amino acid sequence having at least 50%, at least 60%, at least 70%, at least 80%, at least 81%, at least 82%, at least 83%, at least 84%, at least 85%, at least 86%, at least 87%, at least 88%, at least 89%, at least 90%, at least 91%, at least 92%, at least 93%, at least 94%, at least 95%, at least 96%, at least 97%, at least 98%, or at least 99% sequence identity to SEQ ID NO: 1, provided that the amino acid sequence comprises mutations of S128A, L153P, N162E, N219G, K229E, H275Y, S306P, K324I, F333N, 177_183KEYQSNKdelinsRDNRDN (SEQ ID NOs: 920 and 919), wherein the positions correspond to SEQ ID NO: 1. In some embodiments, the polypeptide having protease activity comprises an amino acid sequence having at least 50%, at least 60%, at least 70%, at least 80%, at least 81%, at least 82%, at least 83%, at least 84%, at least 85%, at least 86%, at least 87%, at least 88%, at least 89%, at least 90%, at least 91%, at least 92%, at least 93%, at least 94%, at least 95%, at least 96%, at least 97%, at least 98%, or at least 99% sequence identity to SEQ ID NO: 1, provided that the amino acid sequence comprises mutations of S128A, K150E, L153P, N162E, N219G, K229E, H275Y, K324I, F333N, 177_183KEYQSNKdelinsRDNRDN (SEQ ID NOs: 920 and 919), wherein the positions correspond to SEQ ID NO: 1. In some embodiments, the polypeptide having protease activity comprises an amino acid sequence having at least 50%, at least 60%, at least 70%, at least 80%, at least 81%, at least 82%, at least 83%, at least 84%, at least 85%, at least 86%, at least 87%, at least 88%, at least 89%, at least 90%, at least 91%, at least 92%, at least 93%, at least 94%, at least 95%, at least 96%, at least 97%, at least 98%, or at least 99% sequence identity to SEQ ID NO: 1, provided that the amino acid sequence comprises mutations of S128A, L153P, N162E, H174E, K196S, N219G, K229E, H275Y, K318A, K324I, F333N, 177_183KEYQSNKdelinsRDNRDN (SEQ ID NOs: 920 and 919), wherein the positions correspond to SEQ ID NO: 1. In some embodiments, the polypeptide having protease activity comprises an amino acid sequence having at least 50%, at least 60%, at least 70%, at least 80%, at least 81%, at least 82%, at least 83%, at least 84%, at least 85%, at least 86%, at least 87%, at least 88%, at least 89%, at least 90%, at least 91%, at least 92%, at least 93%, at least 94%, at least 95%, at least 96%, at least 97%, at least 98%, or at least 99% sequence identity to SEQ ID NO: 1, provided that the amino acid sequence comprises mutations of S128A, L153P, N162E, H174E, N219G, H222Q, K229E, H275Y, R280E, K324I, F333N, 177_183KEYQSNKdelinsRDNRDN (SEQ ID NOs: 920 and 919), wherein the positions correspond to SEQ ID NO: 1. In some embodiments, the polypeptide having protease activity comprises an amino acid sequence having at least 50%, at least 60%, at least 70%, at least 80%, at least 81%, at least 82%, at least 83%, at least 84%, at least 85%, at least 86%, at least 87%, at least 88%, at least 89%, at least 90%, at least 91%, at least 92%, at least 93%, at least 94%, at least 95%, at least 96%, at least 97%, at least 98%, or at least 99% sequence identity to SEQ ID NO: 1, provided that the amino acid sequence comprises mutations of S128A, L153P, N162E, H174E, K196S, N219G, H222Q, K229E, H275Y, R280E, K318A, K324I, F333N, 177_183KEYQSNKdelinsRDNRDN (SEQ ID NOs: 920 and 919), wherein the positions correspond to SEQ ID NO: 1. In some embodiments, the polypeptide having protease activity comprises an amino acid sequence having at least 50%, at least 60%, at least 70%, at least 80%, at least 81%, at least 82%, at least 83%, at least 84%, at least 85%, at least 86%, at least 87%, at least 88%, at least 89%, at least 90%, at least 91%, at least 92%, at least 93%, at least 94%, at least 95%, at least 96%, at least 97%, at least 98%, or at least 99% sequence identity to SEQ ID NO: 1, provided that the amino acid sequence comprises mutations of S128A, L153P, N162E, H174E, N219G, K229E, H275Y, K324I, D332K, F333N, 177_183KEYQSNKdelinsRDNRDN (SEQ ID NOs: 920 and 919), wherein the positions correspond to SEQ ID NO: 1. In some embodiments, the polypeptide having protease activity comprises an amino acid sequence having at least 50%, at least 60%, at least 70%, at least 80%, at least 81%, at least 82%, at least 83%, at least 84%, at least 85%, at least 86%, at least 87%, at least 88%, at least 89%, at least 90%, at least 91%, at least 92%, at least 93%, at least 94%, at least 95%, at least 96%, at least 97%, at least 98%, or at least 99% sequence identity to SEQ ID NO: 1, provided that the amino acid sequence comprises mutations of S128A, L153P, N162E, H174E, N219G, K229E, N233G, H275Y, K324I, F333N, 177_183KEYQSNKdelinsRDNRDN (SEQ ID NOs: 920 and 919), wherein the positions correspond to SEQ ID NO: 1. In some embodiments, the polypeptide having protease activity comprises an amino acid sequence having at least 50%, at least 60%, at least 70%, at least 80%, at least 81%, at least 82%, at least 83%, at least 84%, at least 85%, at least 86%, at least 87%, at least 88%, at least 89%, at least 90%, at least 91%, at least 92%, at least 93%, at least 94%, at least 95%, at least 96%, at least 97%, at least 98%, or at least 99% sequence identity to SEQ ID NO: 1, provided that the amino acid sequence comprises mutations of S128A, L153P, N162E, H174E, N219G, K229E, I254R, H275Y, K324I, F333N, 177_183KEYQSNKdelinsRDNRDN (SEQ ID NOs: 920 and 919), wherein the positions correspond to SEQ ID NO: 1. In some embodiments, the polypeptide having protease activity comprises an amino acid sequence having at least 50%, at least 60%, at least 70%, at least 80%, at least 81%, at least 82%, at least 83%, at least 84%, at least 85%, at least 86%, at least 87%, at least 88%, at least 89%, at least 90%, at least 91%, at least 92%, at least 93%, at least 94%, at least 95%, at least 96%, at least 97%, at least 98%, or at least 99% sequence identity to SEQ ID NO: 1, provided that the amino acid sequence comprises mutations of S128A, L153P, N162E, H174E, N219G, K229E, H275Y, K324I, F333N, E363K, 177_183KEYQSNKdelinsRDNRDN (SEQ ID NOs: 920 and 919), wherein the positions correspond to SEQ ID NO: 1. In some embodiments, the polypeptide having protease activity comprises an amino acid sequence having at least 50%, at least 60%, at least 70%, at least 80%, at least 81%, at least 82%, at least 83%, at least 84%, at least 85%, at least 86%, at least 87%, at least 88%, at least 89%, at least 90%, at least 91%, at least 92%, at least 93%, at least 94%, at least 95%, at least 96%, at least 97%, at least 98%, or at least 99% sequence identity to SEQ ID NO: 1, provided that the amino acid sequence comprises mutations of S128A, L153P, N162E, H174E, N219G, K229E, H275Y, K324I, F333N, E366K, 177_183KEYQSNKdelinsRDNRDN (SEQ ID NOs: 920 and 919), wherein the positions correspond to SEQ ID NO: 1. In some embodiments, the polypeptide having protease activity comprises an amino acid sequence having at least 50%, at least 60%, at least 70%, at least 80%, at least 81%, at least 82%, at least 83%, at least 84%, at least 85%, at least 86%, at least 87%, at least 88%, at least 89%, at least 90%, at least 91%, at least 92%, at least 93%, at least 94%, at least 95%, at least 96%, at least 97%, at least 98%, or at least 99% sequence identity to SEQ ID NO: 1, provided that the amino acid sequence comprises mutations of S128A, L153P, N162E, H174E, N219G, K229E, H275Y, K324I, F333N, E347N, 177_183KEYQSNKdelinsRDNRDN (SEQ ID NOs: 920 and 919), wherein the positions correspond to SEQ ID NO: 1. In some embodiments, the polypeptide having protease activity comprises an amino acid sequence having at least 50%, at least 60%, at least 70%, at least 80%, at least 81%, at least 82%, at least 83%, at least 84%, at least 85%, at least 86%, at least 87%, at least 88%, at least 89%, at least 90%, at least 91%, at least 92%, at least 93%, at least 94%, at least 95%, at least 96%, at least 97%, at least 98%, or at least 99% sequence identity to SEQ ID NO: 1, provided that the amino acid sequence comprises mutations of T122S, S128A, L153P, N162E, H174E, K196S, N219G, K229E, H275Y, K318A, K324I, F333N, 177_183KEYQSNKdelinsRDNRDN (SEQ ID NOs: 920 and 919), wherein the positions correspond to SEQ ID NO: 1. In some embodiments, the polypeptide having protease activity comprises an amino acid sequence having at least 50%, at least 60%, at least 70%, at least 80%, at least 81%, at least 82%, at least 83%, at least 84%, at least 85%, at least 86%, at least 87%, at least 88%, at least 89%, at least 90%, at least 91%, at least 92%, at least 93%, at least 94%, at least 95%, at least 96%, at least 97%, at least 98%, or at least 99% sequence identity to SEQ ID NO: 1, provided that the amino acid sequence comprises mutations of T122S, S128A, L153P, N162E, H174E, N219G, H222Q, K229E, H275Y, R280E, K324I, F333N, 177_183KEYQSNKdelinsRDNRDN (SEQ ID NOs: 920 and 919), wherein the positions correspond to SEQ ID NO: 1. In some embodiments, the polypeptide having protease activity comprises an amino acid sequence having at least 50%, at least 60%, at least 70%, at least 80%, at least 81%, at least 82%, at least 83%, at least 84%, at least 85%, at least 86%, at least 87%, at least 88%, at least 89%, at least 90%, at least 91%, at least 92%, at least 93%, at least 94%, at least 95%, at least 96%, at least 97%, at least 98%, or at least 99% sequence identity to SEQ ID NO: 1, provided that the amino acid sequence comprises mutations of T122S, S128A, L153P, N162E, H174E, K196S, N219G, H222Q, K229E, H275Y, R280E, K318A, K324I, F333N, 177_183KEYQSNKdelinsRDNRDN (SEQ ID NOs: 920 and 919), wherein the positions correspond to SEQ ID NO: 1. In some embodiments, the polypeptide having protease activity comprises an amino acid sequence having at least 50%, at least 60%, at least 70%, at least 80%, at least 81%, at least 82%, at least 83%, at least 84%, at least 85%, at least 86%, at least 87%, at least 88%, at least 89%, at least 90%, at least 91%, at least 92%, at least 93%, at least 94%, at least 95%, at least 96%, at least 97%, at least 98%, or at least 99% sequence identity to SEQ ID NO: 1, provided that the amino acid sequence comprises mutations of S128A, L153P, N162E, H174E, N219G, K229E, H275Y, K324I, F333N, E363K, E366K, 177_183KEYQSNKdelinsRDNRDN (SEQ ID NOs: 920 and 919), wherein the positions correspond to SEQ ID NO: 1. In some embodiments, the polypeptide having protease activity comprises an amino acid sequence having at least 50%, at least 60%, at least 70%, at least 80%, at least 81%, at least 82%, at least 83%, at least 84%, at least 85%, at least 86%, at least 87%, at least 88%, at least 89%, at least 90%, at least 91%, at least 92%, at least 93%, at least 94%, at least 95%, at least 96%, at least 97%, at least 98%, or at least 99% sequence identity to SEQ ID NO: 1, provided that the amino acid sequence comprises mutations of S128A, L153P, N162E, H174E, N219G, K229E, H275Y, K324I, D332K, F333N, E347N, 177_183KEYQSNKdelinsRDNRDN (SEQ ID NOs: 920 and 919), wherein the positions correspond to SEQ ID NO: 1. In some embodiments, the polypeptide having protease activity comprises an amino acid sequence having at least 50%, at least 60%, at least 70%, at least 80%, at least 81%, at least 82%, at least 83%, at least 84%, at least 85%, at least 86%, at least 87%, at least 88%, at least 89%, at least 90%, at least 91%, at least 92%, at least 93%, at least 94%, at least 95%, at least 96%, at least 97%, at least 98%, or at least 99% sequence identity to SEQ ID NO: 1, provided that the amino acid sequence comprises mutations of S128A, L153P, N162E, H174E, N219G, K229E, I254R, H275Y, K324I, D332K, F333N, E347N, E363K, E366K, 177_183KEYQSNKdelinsRDNRDN (SEQ ID NOs: 920 and 919), wherein the positions correspond to SEQ ID NO: 1. In some embodiments, the polypeptide having protease activity comprises an amino acid sequence having at least 50%, at least 60%, at least 70%, at least 80%, at least 81%, at least 82%, at least 83%, at least 84%, at least 85%, at least 86%, at least 87%, at least 88%, at least 89%, at least 90%, at least 91%, at least 92%, at least 93%, at least 94%, at least 95%, at least 96%, at least 97%, at least 98%, or at least 99% sequence identity to SEQ ID NO: 1, provided that the amino acid sequence comprises mutations of C125S, S128A, L153P, N162E, H174E, N219G, K229E, H275Y, K324I, F333N, 177_183KEYQSNKdelinsRDNRDN (SEQ ID NOs: 920 and 919), wherein the positions correspond to SEQ ID NO: 1. In some embodiments, the polypeptide having protease activity comprises an amino acid sequence having at least 50%, at least 60%, at least 70%, at least 80%, at least 81%, at least 82%, at least 83%, at least 84%, at least 85%, at least 86%, at least 87%, at least 88%, at least 89%, at least 90%, at least 91%, at least 92%, at least 93%, at least 94%, at least 95%, at least 96%, at least 97%, at least 98%, or at least 99% sequence identity to SEQ ID NO: 1, provided that the amino acid sequence comprises mutations of S128A, D152N, L153P, N162E, H174E, N219G, K229E, H275Y, K324I, F333N, 177_183KEYQSNKdelinsRDNRDN (SEQ ID NOs: 920 and 919), wherein the positions correspond to SEQ ID NO: 1. In some embodiments, the polypeptide having protease activity comprises an amino acid sequence having at least 50%, at least 60%, at least 70%, at least 80%, at least 81%, at least 82%, at least 83%, at least 84%, at least 85%, at least 86%, at least 87%, at least 88%, at least 89%, at least 90%, at least 91%, at least 92%, at least 93%, at least 94%, at least 95%, at least 96%, at least 97%, at least 98%, or at least 99% sequence identity to SEQ ID NO: 1, provided that the amino acid sequence comprises mutations of S128A, L153P, N162E, H174E, N219G, K229E, H275Y, K324I, F333E, 177_183KEYQSNKdelinsRDNRDN (SEQ ID NOs: 920 and 919), wherein the positions correspond to SEQ ID NO: 1. In some embodiments, the polypeptide having protease activity comprises an amino acid sequence having at least 50%, at least 60%, at least 70%, at least 80%, at least 81%, at least 82%, at least 83%, at least 84%, at least 85%, at least 86%, at least 87%, at least 88%, at least 89%, at least 90%, at least 91%, at least 92%, at least 93%, at least 94%, at least 95%, at least 96%, at least 97%, at least 98%, or at least 99% sequence identity to SEQ ID NO: 1, provided that the amino acid sequence comprises mutations of S128A, L153P, N162E, H174E, H197D, N219G, K229E, H275Y, K324I, F333N, 177_183KEYQSNKdelinsRDNRDN (SEQ ID NOs: 920 and 919), wherein the positions correspond to SEQ ID NO: 1. In some embodiments, the polypeptide having protease activity comprises an amino acid sequence having at least 50%, at least 60%, at least 70%, at least 80%, at least 81%, at least 82%, at least 83%, at least 84%, at least 85%, at least 86%, at least 87%, at least 88%, at least 89%, at least 90%, at least 91%, at least 92%, at least 93%, at least 94%, at least 95%, at least 96%, at least 97%, at least 98%, or at least 99% sequence identity to SEQ ID NO: 1, provided that the amino acid sequence comprises mutations of S128A, L153P, N162E, H174E, N219G, K229E, N233G, H275Y, K324I, D332K, F333N, 177_183KEYQSNKdelinsRDNRDN (SEQ ID NOs: 920 and 919), wherein the positions correspond to SEQ ID NO: 1. In some embodiments, the polypeptide having protease activity comprises an amino acid sequence having at least 50%, at least 60%, at least 70%, at least 80%, at least 81%, at least 82%, at least 83%, at least 84%, at least 85%, at least 86%, at least 87%, at least 88%, at least 89%, at least 90%, at least 91%, at least 92%, at least 93%, at least 94%, at least 95%, at least 96%, at least 97%, at least 98%, or at least 99% sequence identity to SEQ ID NO: 1, provided that the amino acid sequence comprises mutations of S128A, L153P, N162E, N219Q, K229E, R280T, K324I, F333N, wherein the positions correspond to SEQ ID NO: 1. In some embodiments, the polypeptide having protease activity comprises an amino acid sequence having at least 50%, at least 60%, at least 70%, at least 80%, at least 81%, at least 82%, at least 83%, at least 84%, at least 85%, at least 86%, at least 87%, at least 88%, at least 89%, at least 90%, at least 91%, at least 92%, at least 93%, at least 94%, at least 95%, at least 96%, at least 97%, at least 98%, or at least 99% sequence identity to SEQ ID NO: 1, provided that the amino acid sequence comprises mutations of S128A, L153P, N162E, N219Q, K229E, R280T, D307N, K324I, F333N, wherein the positions correspond to SEQ ID NO: 1.

[0063] In some embodiments, the polypeptide having protease activity comprises an amino acid sequence having at least 50%, at least 51%, at least 52%, at least 53%, at least 54%, at least 55%, at least 56%, at least 57%, at least 58%, at least 59%, at least 60%, at least 61%, at least 62%, at least 63%, at least 64%, at least 65%, at least 66%, at least 67%, at least 68%, at least 69%, at least 70%, at least 71%, at least 72%, at least 73%, at least 74%, at least 75%, at least 76%, at least 77%, at least 78%, at least 79%, at least 80%, at least 81%, at least 82%, at least 83%, at least 84%, at least 85%, at least 86%, at least 87%, at least 88%, at least 89%, at least 90%, at least 91%, at least 92%, at least 93%, at least 94%, at least 95%, at least 96%, at least 97%, at least 98%, or at least 99% sequence identity to SEQ ID NO: 1, provided that the amino acid sequence comprises a cysteine (C) at a position in the polypeptide that corresponds to position 125 of SEQ ID NO: 1, a histidine (H) at a position in the polypeptide that corresponds to position 283 of SEQ ID NO: 1, an aspartic acid (D) at a position in the polypeptide that corresponds to position 305 of SEQ ID NO: 1, an aspartic acid (D) at a position in the polypeptide that corresponds to position 307 of SEQ ID NO: 1, and/or a lysine (K) at a position in the polypeptide that corresponds to position 115 of SEQ ID NO: 1.

[0064] In some embodiments, the polypeptide having protease activity comprises an amino acid sequence having at least 50%, at least 51%, at least 52%, at least 53%, at least 54%, at least 55%, at least 56%, at least 57%, at least 58%, at least 59%, at least 60%, at least 61%, at least 62%, at least 63%, at least 64%, at least 65%, at least 66%, at least 67%, at least 68%, at least 69%, at least 70%, at least 71%, at least 72%, at least 73%, at least 74%, at least 75%, at least 76%, at least 77%, at least 78%, at least 79%, at least 80%, at least 81%, at least 82%, at least 83%, at least 84%, at least 85%, at least 86%, at least 87%, at least 88%, at least 89%, at least 90%, at least 91%, at least 92%, at least 93%, at least 94%, at least 95%, at least 96%, at least 97%, at least 98%, or at least 99% sequence identity to SEQ ID NO: 1, provided that the amino acid sequence comprises one or more mutations selected from D71E, D71Q, D88H, D112Q, D152N, D139E, D307N, D293G, D295K, D295N, E75Y, E86D, E120D, E120G, E143D, E166Q, E241D, E310D, E310N, E310Q, E310S, E347N, E347R, E348R, E363K, E366K, F148Y, F175I, F333D, F333E, F333N, G199P, H174D, H174E, H197D, H197K, H197R, H222E, H222Q, H222S, H222T, H268G, H268R, H268S, H275L, H275Y, 184G, 184P, 184V, 1262K, I301L, I336A, K68W, K93D, K93S, K115L, K116D, K149L, K150E, K160E, K165E, K167R, K183D, K195L, K195R, K196D, K196E, K196L, K196Q, K196S, K196T, K201E, K201S, K205L, K229D, K229E, K229N, K244L, K297N, K297R, K318A, K318D, K318E, K318F, K318G, K318I, K318L, K318N, K318P, K318Q, K318S, K318V, K320W, K324I, K346P, K360R, L153P, L279G, L279T, L279W, L279Y, L329K, L329R, M117E, M117F, M323L, N162D, N162E, N173K, N182D, N182P, N219G, N219K, N219Q, N219T, N228K, N233G, N242G, N243K, N260A, P205F, P205FG, P205L, P205LG, Q180H, Q232E, Q294E, R142K, R189K, R250GGYGG (SEQ ID NO: 918), R250GYG, R256D, R282G, R282N, R280A, R280D, R280E, R280N, R280T, R280Y, R309G, R319E, R319T, R320L, R320Q, R320W, R337L, R360L, S94D, S94E, S94N, S128A, S181D, S220Y, S221E, S221N, S221Y, S251I, S286T, S306P, S317N, T122E, T122N, T122S, T167G, T176G, T276G, T276R, V102A, V102L, V164K, V270P, V274G, V303I, V303Y, V364E, Y212F, Y217W, Y224T, Y252R, Y281H, Y281S, Y281T, Y360L, 177_183delinsRDNRDN (SEQ ID NO: 919), 177_183KEYQSNKdelinsESDHG (SEQ ID NOs: 920 and 921), 177_183KEYQSNKdelinsRDNRDN (SEQ ID NOs: 920 and 919), 177_185KEYQSNKYAdelinsESPNT (SEQ ID NOs: 922 and 923), 177_318KEYQSNKNSKdelinsRDNRDN (SEQ ID NOs: 924 and 919), 177_319KEYQSNKDRdelinsRDNRDN (SEQ ID NOs: 925 and 919), 177_319KEYQSNKFNDNSKRdelinsRDNRDNIGDE (SEQ ID NOs: 926 and 927), 177_317KEYQSNKNDNSdelinsRDNRDN (SEQ ID NOs: 928 and 919), 180_185QSNKYAdelinsSG (SEQ ID NO: 929), 200_202NKAdelinsPYLSTKHL (SEQ ID NO: 930), 271_287delinsVGISGSAGGIKSVDSDGDSYI (SEQ ID NO: 932), 308_324delinsTKSVDSDGDSYKINY (SEQ ID NO: 932), 303_326delinsTGAKGNNYFGHWHFAVRVRL (SEQ ID NO: 933), 306_324delinsGHYGVYNGVTYWGHTPLHLAAMLGHLVYGLY (SEQ ID NO: 934), 306_324delinsQRTPLHLAAWADHLYR (SEQ ID NO: 935), 307_322delinsLAKGNNYFGHWHFAVM (SEQ ID NO: 936), 307_324delinsGGFAFDISIDNGNEDVY (SEQ ID NO: 937), 311_319delinsLLKPKILGYNITSGYSDEIY (SEQ ID NO: 938), 311_321delinsLSNVEALGYNITSGYSDKRY (SEQ ID NO: 939), 310_320delinsFLVFGVTYDGSTPVP (SEQ ID NO: 940), 311_321delinsLSNVEALGYNITSGYSDKRY (SEQ ID NO: 939), 86_105delinsDDMEAKGNNYFGHWHFAVATN (SEQ ID NO: 941), 88_102delinsGEIVAFDISIDNGNEDLAEILQLSTYDGGG (SEQ ID NO: 942), 91_100delinsGGGGGKSVDSDGDSYGGGGG (SEQ ID NO: 943), 93_98delinsGGGGGKSVDSDGDSYGGGG (SEQ ID NO: 944), 174_187delinsVMYKGKKLLEAARAGQPDSSE (SEQ ID NO: 945), 271_287delinsVGISGSAGGIKSVDSDGDSYI (SEQ ID NO: 932), 303_326delinsTGAKGNNYFGHWHFAVRVRL (SEQ ID NO: 933), 308_324delinsTKSVDSDGDSYKINY (SEQ ID NO: 932), and 380insENNVADSNKNSEDVEVSSVEFDFLNFKYPKNEDQVSTEDMRLTLKDTNVFNQPQ VKISFEEQNGNDWKEKDSGTFEEGKKYRLKIDVNKLALKIYGHLSKNKLNVIVNGKAV NIQNVVKKDSIETSFTIYSDSIDLEKINYWTDSFNNWS (SEQ ID NO: 744), wherein the positions correspond to SEQ ID NO: 1, and provided that the amino acid sequence comprises a cysteine (C) at a position in the polypeptide that corresponds to position 125 of SEQ ID NO: 1, a histidine (H) at a position in the polypeptide that corresponds to position 283 of SEQ ID NO: 1, an aspartic acid (D) at a position in the polypeptide that corresponds to position 305 of SEQ ID NO: 1, an aspartic acid (D) at a position in the polypeptide that corresponds to position 307 of SEQ ID NO: 1, and/or a lysine (K) at a position in the polypeptide that corresponds to position 115 of SEQ ID NO: 1.

[0065] In some embodiments, the polypeptide having protease activity comprises an amino acid sequence having at least 50%, at least 60%, at least 70%, at least 80%, at least 81%, at least 82%, at least 83%, at least 84%, at least 85%, at least 86%, at least 87%, at least 88%, at least 89%, at least 90%, at least 91%, at least 92%, at least 93%, at least 94%, at least 95%, at least 96%, at least 97%, at least 98%, or at least 99% sequence identity to SEQ ID NO: 1, provided that the amino acid sequence comprises mutations of L153P, R189K, S128A, wherein the positions correspond to SEQ ID NO: 1, and provided that the amino acid sequence comprises a cysteine (C) at a position in the polypeptide that corresponds to position 125 of SEQ ID NO: 1, a histidine (H) at a position in the polypeptide that corresponds to position 283 of SEQ ID NO: 1, an aspartic acid (D) at a position in the polypeptide that corresponds to position 305 of SEQ ID NO: 1, an aspartic acid (D) at a position in the polypeptide that corresponds to position 307 of SEQ ID NO: 1, and/or a lysine (K) at a position in the polypeptide that corresponds to position 115 of SEQ ID NO: 1. In some embodiments, the polypeptide having protease activity comprises an amino acid sequence having at least 50%, at least 60%, at least 70%, at least 80%, at least 81%, at least 82%, at least 83%, at least 84%, at least 85%, at least 86%, at least 87%, at least 88%, at least 89%, at least 90%, at least 91%, at least 92%, at least 93%, at least 94%, at least 95%, at least 96%, at least 97%, at least 98%, or at least 99% sequence identity to SEQ ID NO: 1, provided that the amino acid sequence comprises mutations of L153P, S128A, F333N, wherein the positions correspond to SEQ ID NO: 1, and provided that the amino acid sequence comprises a cysteine (C) at a position in the polypeptide that corresponds to position 125 of SEQ ID NO: 1, a histidine (H) at a position in the polypeptide that corresponds to position 283 of SEQ ID NO: 1, an aspartic acid (D) at a position in the polypeptide that corresponds to position 305 of SEQ ID NO: 1, an aspartic acid (D) at a position in the polypeptide that corresponds to position 307 of SEQ ID NO: 1, and/or a lysine (K) at a position in the polypeptide that corresponds to position 115 of SEQ ID NO: 1. In some embodiments, the polypeptide having protease activity comprises an amino acid sequence having at least 50%, at least 60%, at least 70%, at least 80%, at least 81%, at least 82%, at least 83%, at least 84%, at least 85%, at least 86%, at least 87%, at least 88%, at least 89%, at least 90%, at least 91%, at least 92%, at least 93%, at least 94%, at least 95%, at least 96%, at least 97%, at least 98%, or at least 99% sequence identity to SEQ ID NO: 1, provided that the amino acid sequence comprises mutations of T122S, K229E, wherein the positions correspond to SEQ ID NO: 1, and provided that the amino acid sequence comprises a cysteine (C) at a position in the polypeptide that corresponds to position 125 of SEQ ID NO: 1, a histidine (H) at a position in the polypeptide that corresponds to position 283 of SEQ ID NO: 1, an aspartic acid (D) at a position in the polypeptide that corresponds to position 305 of SEQ ID NO: 1, an aspartic acid (D) at a position in the polypeptide that corresponds to position 307 of SEQ ID NO: 1, and/or a lysine (K) at a position in the polypeptide that corresponds to position 115 of SEQ ID NO: 1. In some embodiments, the polypeptide having protease activity comprises an amino acid sequence having at least 50%, at least 60%, at least 70%, at least 80%, at least 81%, at least 82%, at least 83%, at least 84%, at least 85%, at least 86%, at least 87%, at least 88%, at least 89%, at least 90%, at least 91%, at least 92%, at least 93%, at least 94%, at least 95%, at least 96%, at least 97%, at least 98%, or at least 99% sequence identity to SEQ ID NO: 1, provided that the amino acid sequence comprises mutations of T122S, L153P, wherein the positions correspond to SEQ ID NO: 1, and provided that the amino acid sequence comprises a cysteine (C) at a position in the polypeptide that corresponds to position 125 of SEQ ID NO: 1, a histidine (H) at a position in the polypeptide that corresponds to position 283 of SEQ ID NO: 1, an aspartic acid (D) at a position in the polypeptide that corresponds to position 305 of SEQ ID NO: 1, an aspartic acid (D) at a position in the polypeptide that corresponds to position 307 of SEQ ID NO: 1, and/or a lysine (K) at a position in the polypeptide that corresponds to position 115 of SEQ ID NO: 1. In some embodiments, the polypeptide having protease activity comprises an amino acid sequence having at least 50%, at least 60%, at least 70%, at least 80%, at least 81%, at least 82%, at least 83%, at least 84%, at least 85%, at least 86%, at least 87%, at least 88%, at least 89%, at least 90%, at least 91%, at least 92%, at least 93%, at least 94%, at least 95%, at least 96%, at least 97%, at least 98%, or at least 99% sequence identity to SEQ ID NO: 1, provided that the amino acid sequence comprises mutations of T122S, L153P, R189K, wherein the positions correspond to SEQ ID NO: 1, and provided that the amino acid sequence comprises a cysteine (C) at a position in the polypeptide that corresponds to position 125 of SEQ ID NO: 1, a histidine (H) at a position in the polypeptide that corresponds to position 283 of SEQ ID NO: 1, an aspartic acid (D) at a position in the polypeptide that corresponds to position 305 of SEQ ID NO: 1, an aspartic acid (D) at a position in the polypeptide that corresponds to position 307 of SEQ ID NO: 1, and/or a lysine (K) at a position in the polypeptide that corresponds to position 115 of SEQ ID NO: 1. In some embodiments, the polypeptide having protease activity comprises an amino acid sequence having at least 50%, at least 60%, at least 70%, at least 80%, at least 81%, at least 82%, at least 83%, at least 84%, at least 85%, at least 86%, at least 87%, at least 88%, at least 89%, at least 90%, at least 91%, at least 92%, at least 93%, at least 94%, at least 95%, at least 96%, at least 97%, at least 98%, or at least 99% sequence identity to SEQ ID NO: 1, provided that the amino acid sequence comprises mutations of T122S, L153P, S128A, wherein the positions correspond to SEQ ID NO: 1, and provided that the amino acid sequence comprises a cysteine (C) at a position in the polypeptide that corresponds to position 125 of SEQ ID NO: 1, a histidine (H) at a position in the polypeptide that corresponds to position 283 of SEQ ID NO: 1, an aspartic acid (D) at a position in the polypeptide that corresponds to position 305 of SEQ ID NO: 1, an aspartic acid (D) at a position in the polypeptide that corresponds to position 307 of SEQ ID NO: 1, and/or a lysine (K) at a position in the polypeptide that corresponds to position 115 of SEQ ID NO: 1. In some embodiments, the polypeptide having protease activity comprises an amino acid sequence having at least 50%, at least 60%, at least 70%, at least 80%, at least 81%, at least 82%, at least 83%, at least 84%, at least 85%, at least 86%, at least 87%, at least 88%, at least 89%, at least 90%, at least 91%, at least 92%, at least 93%, at least 94%, at least 95%, at least 96%, at least 97%, at least 98%, or at least 99% sequence identity to SEQ ID NO: 1, provided that the amino acid sequence comprises mutations of T122S, L153P, V126S, wherein the positions correspond to SEQ ID NO: 1, and provided that the amino acid sequence comprises a cysteine (C) at a position in the polypeptide that corresponds to position 125 of SEQ ID NO: 1, a histidine (H) at a position in the polypeptide that corresponds to position 283 of SEQ ID NO: 1, an aspartic acid (D) at a position in the polypeptide that corresponds to position 305 of SEQ ID NO: 1, an aspartic acid (D) at a position in the polypeptide that corresponds to position 307 of SEQ ID NO: 1, and/or a lysine (K) at a position in the polypeptide that corresponds to position 115 of SEQ ID NO: 1. In some embodiments, the polypeptide having protease activity comprises an amino acid sequence having at least 50%, at least 60%, at least 70%, at least 80%, at least 81%, at least 82%, at least 83%, at least 84%, at least 85%, at least 86%, at least 87%, at least 88%, at least 89%, at least 90%, at least 91%, at least 92%, at least 93%, at least 94%, at least 95%, at least 96%, at least 97%, at least 98%, or at least 99% sequence identity to SEQ ID NO: 1, provided that the amino acid sequence comprises mutations of T122S, S128A, F333N, wherein the positions correspond to SEQ ID NO: 1, and provided that the amino acid sequence comprises a cysteine (C) at a position in the polypeptide that corresponds to position 125 of SEQ ID NO: 1, a histidine (H) at a position in the polypeptide that corresponds to position 283 of SEQ ID NO: 1, an aspartic acid (D) at a position in the polypeptide that corresponds to position 305 of SEQ ID NO: 1, an aspartic acid (D) at a position in the polypeptide that corresponds to position 307 of SEQ ID NO: 1, and/or a lysine (K) at a position in the polypeptide that corresponds to position 115 of SEQ ID NO: 1. In some embodiments, the polypeptide having protease activity comprises an amino acid sequence having at least 50%, at least 60%, at least 70%, at least 80%, at least 81%, at least 82%, at least 83%, at least 84%, at least 85%, at least 86%, at least 87%, at least 88%, at least 89%, at least 90%, at least 91%, at least 92%, at least 93%, at least 94%, at least 95%, at least 96%, at least 97%, at least 98%, or at least 99% sequence identity to SEQ ID NO: 1, provided that the amino acid sequence comprises mutations of E166Q, wherein the positions correspond to SEQ ID NO: 1, and provided that the amino acid sequence comprises a cysteine (C) at a position in the polypeptide that corresponds to position 125 of SEQ ID NO: 1, a histidine (H) at a position in the polypeptide that corresponds to position 283 of SEQ ID NO: 1, an aspartic acid (D) at a position in the polypeptide that corresponds to position 305 of SEQ ID NO: 1, an aspartic acid (D) at a position in the polypeptide that corresponds to position 307 of SEQ ID NO: 1, and/or a lysine (K) at a position in the polypeptide that corresponds to position 115 of SEQ ID NO: 1. In some embodiments, the polypeptide having protease activity comprises an amino acid sequence having at least 50%, at least 60%, at least 70%, at least 80%, at least 81%, at least 82%, at least 83%, at least 84%, at least 85%, at least 86%, at least 87%, at least 88%, at least 89%, at least 90%, at least 91%, at least 92%, at least 93%, at least 94%, at least 95%, at least 96%, at least 97%, at least 98%, or at least 99% sequence identity to SEQ ID NO: 1, provided that the amino acid sequence comprises mutations of K196S, wherein the positions correspond to SEQ ID NO: 1, and provided that the amino acid sequence comprises a cysteine (H) at a position in the polypeptide that corresponds to position 283 of SEQ ID NO: 1, an aspartic acid (D) at a position in the polypeptide that corresponds to position 305 of SEQ ID NO: 1, an aspartic acid (D) at a position in the polypeptide that corresponds to position 307 of SEQ ID NO: 1, and/or a lysine (K) at a position in the polypeptide that corresponds to position 115 of SEQ ID NO: 1. In some embodiments, the polypeptide having protease activity comprises an amino acid sequence having at least 50%, at least 60%, at least 70%, at least 80%, at least 81%, at least 82%, at least 83%, at least 84%, at least 85%, at least 86%, at least 87%, at least 88%, at least 89%, at least 90%, at least 91%, at least 92%, at least 93%, at least 94%, at least 95%, at least 96%, at least 97%, at least 98%, or at least 99% sequence identity to SEQ ID NO: 1, provided that the amino acid sequence comprises mutations of K196E, wherein the positions correspond to SEQ ID NO: 1, and provided that the amino acid sequence comprises a cysteine (C) at a position in the polypeptide that corresponds to position 125 of SEQ ID NO: 1, a histidine (H) at a position in the polypeptide that corresponds to position 283 of SEQ ID NO: 1, an aspartic acid (D) at a position in the polypeptide that corresponds to position 305 of SEQ ID NO: 1, an aspartic acid (D) at a position in the polypeptide that corresponds to position 307 of SEQ ID NO: 1, and/or a lysine (K) at a position in the polypeptide that corresponds to position 115 of SEQ ID NO: 1. In some embodiments, the polypeptide having protease activity comprises an amino acid sequence having at least 50%, at least 60%, at least 70%, at least 80%, at least 81%, at least 82%, at least 83%, at least 84%, at least 85%, at least 86%, at least 87%, at least 88%, at least 89%, at least 90%, at least 91%, at least 92%, at least 93%, at least 94%, at least 95%, at least 96%, at least 97%, at least 98%, or at least 99% sequence identity to SEQ ID NO: 1, provided that the amino acid sequence comprises mutations of H222Q, wherein the positions correspond to SEQ ID NO: 1, and provided that the amino acid sequence comprises a cysteine (C) at a position in the polypeptide that corresponds to position 125 of SEQ ID NO: 1, a histidine (H) at a position in the polypeptide that corresponds to position 283 of SEQ ID NO: 1, an aspartic acid (D) at a position in the polypeptide that corresponds to position 305 of SEQ ID NO: 1, an aspartic acid (D) at a position in the polypeptide that corresponds to position 307 of SEQ ID NO: 1, and/or a lysine (K) at a position in the polypeptide that corresponds to position 115 of SEQ ID NO: 1. In some embodiments, the polypeptide having protease activity comprises an amino acid sequence having at least 50%, at least 60%, at least 70%, at least 80%, at least 81%, at least 82%, at least 83%, at least 84%, at least 85%, at least 86%, at least 87%, at least 88%, at least 89%, at least 90%, at least 91%, at least 92%, at least 93%, at least 94%, at least 95%, at least 96%, at least 97%, at least 98%, or at least 99% sequence identity to SEQ ID NO: 1, provided that the amino acid sequence comprises mutations of E120G, wherein the positions correspond to SEQ ID NO: 1, and provided that the amino acid sequence comprises a cysteine (C) at a position in the polypeptide that corresponds to position 125 of SEQ ID NO: 1, a histidine (H) at a position in the polypeptide that corresponds to position 283 of SEQ ID NO: 1, an aspartic acid (D) at a position in the polypeptide that corresponds to position 305 of SEQ ID NO: 1, an aspartic acid (D) at a position in the polypeptide that corresponds to position 307 of SEQ ID NO: 1, and/or a lysine (K) at a position in the polypeptide that corresponds to position 115 of SEQ ID NO: 1. In some embodiments, the polypeptide having protease activity comprises an amino acid sequence having at least 50%, at least 60%, at least 70%, at least 80%, at least 81%, at least 82%, at least 83%, at least 84%, at least 85%, at least 86%, at least 87%, at least 88%, at least 89%, at least 90%, at least 91%, at least 92%, at least 93%, at least 94%, at least 95%, at least 96%, at least 97%, at least 98%, or at least 99% sequence identity to SEQ ID NO: 1, provided that the amino acid sequence comprises mutations of K93S, wherein the positions correspond to SEQ ID NO: 1, and provided that the amino acid sequence comprises a cysteine (C) at a position in the polypeptide that corresponds to position 125 of SEQ ID NO: 1, a histidine (H) at a position in the polypeptide that corresponds to position 283 of SEQ ID NO: 1, an aspartic acid (D) at a position in the polypeptide that corresponds to position 305 of SEQ ID NO: 1, an aspartic acid (D) at a position in the polypeptide that corresponds to position 307 of SEQ ID NO: 1, and/or a lysine (K) at a position in the polypeptide that corresponds to position 115 of SEQ ID NO: 1. In some embodiments, the polypeptide having protease activity comprises an amino acid sequence having at least 50%, at least 60%, at least 70%, at least 80%, at least 81%, at least 82%, at least 83%, at least 84%, at least 85%, at least 86%, at least 87%, at least 88%, at least 89%, at least 90%, at least 91%, at least 92%, at least 93%, at least 94%, at least 95%, at least 96%, at least 97%, at least 98%, or at least 99% sequence identity to SEQ ID NO: 1, provided that the amino acid sequence comprises mutations of T122S, wherein the positions correspond to SEQ ID NO: 1, and provided that the amino acid sequence comprises a cysteine ID NO: 1, and/or a lysine (K) at a position in the polypeptide that corresponds to position 115 of SEQ ID NO: 1. In some embodiments, the polypeptide having protease activity comprises an amino acid sequence having at least 50%, at least 60%, at least 70%, at least 80%, at least 81%, at least 82%, at least 83%, at least 84%, at least 85%, at least 86%, at least 87%, at least 88%, at least 89%, at least 90%, at least 91%, at least 92%, at least 93%, at least 94%, at least 95%, at least 96%, at least 97%, at least 98%, or at least 99% sequence identity to SEQ ID NO: 1, provided that the amino acid sequence comprises mutations of K229E, wherein the positions correspond to SEQ ID NO: 1, and provided that the amino acid sequence comprises a cysteine (C) at a position in the polypeptide that corresponds to position 125 of SEQ ID NO: 1, a histidine (H) at a position in the polypeptide that corresponds to position 283 of SEQ ID NO: 1, an aspartic acid (D) at a position in the polypeptide that corresponds to position 305 of SEQ ID NO: 1, an aspartic acid (D) at a position in the polypeptide that corresponds to position 307 of SEQ ID NO: 1, and/or a lysine (K) at a position in the polypeptide that corresponds to position 115 of SEQ ID NO: 1. In some embodiments, the polypeptide having protease activity comprises an amino acid sequence having at least 50%, at least 60%, at least 70%, at least 80%, at least 81%, at least 82%, at least 83%, at least 84%, at least 85%, at least 86%, at least 87%, at least 88%, at least 89%, at least 90%, at least 91%, at least 92%, at least 93%, at least 94%, at least 95%, at least 96%, at least 97%, at least 98%, or at least 99% sequence identity to SEQ ID NO: 1, provided that the amino acid sequence comprises mutations of N162E, wherein the positions correspond to SEQ ID NO: 1, and provided that the amino acid sequence comprises a cysteine (C) at a position in the polypeptide that corresponds to position 125 of SEQ ID NO: 1, a histidine (H) at a position in the polypeptide that corresponds to position 283 of SEQ ID NO: 1, an aspartic acid (D) at a position in the polypeptide that corresponds to position 305 of SEQ ID NO: 1, an aspartic acid (D) at a position in the polypeptide that corresponds to position 307 of SEQ ID NO: 1, and/or a lysine (K) at a position in the polypeptide that corresponds to position 115 of SEQ ID NO: 1. In some embodiments, the polypeptide having protease activity comprises an amino acid sequence having at least 50%, at least 60%, at least 70%, at least 80%, at least 81%, at least 82%, at least 83%, at least 84%, at least 85%, at least 86%, at least 87%, at least 88%, at least 89%, at least 90%, at least 91%, at least 92%, at least 93%, at least 94%, at least 95%, at least 96%, at least 97%, at least 98%, or at least 99% sequence identity to SEQ ID NO: 1, provided that the amino acid sequence comprises mutations of R280E, wherein the positions correspond to SEQ ID NO: 1, and provided that the amino acid sequence comprises a cysteine (C) at a position in the polypeptide that corresponds to position 125 of SEQ ID NO: 1, a histidine (H) at a position in the polypeptide that corresponds to position 283 of SEQ ID NO: 1, an aspartic acid (D) at a position in the polypeptide that corresponds to position 305 of SEQ ID NO: 1, an aspartic acid (D) at a position in the polypeptide that corresponds to position 307 of SEQ ID NO: 1, and/or a lysine (K) at a position in the polypeptide that corresponds to position 115 of SEQ ID NO: 1. In some embodiments, the polypeptide having protease activity comprises an amino acid sequence having at least 50%, at least 60%, at least 70%, at least 80%, at least 81%, at least 82%, at least 83%, at least 84%, at least 85%, at least 86%, at least 87%, at least 88%, at least 89%, at least 90%, at least 91%, at least 92%, at least 93%, at least 94%, at least 95%, at least 96%, at least 97%, at least 98%, or at least 99% sequence identity to SEQ ID NO: 1, provided that the amino acid sequence comprises mutations of K318G, wherein the positions correspond to SEQ ID NO: 1, and provided that the amino acid sequence comprises a cysteine (C) at a position in the polypeptide that corresponds to position 125 of SEQ ID NO: 1, a histidine (H) at a position in the polypeptide that corresponds to position 283 of SEQ ID NO: 1, an aspartic acid (D) at a position in the polypeptide that corresponds to position 305 of SEQ ID NO: 1, an aspartic acid (D) at a position in the polypeptide that corresponds to position 307 of SEQ ID NO: 1, and/or a lysine (K) at a position in the polypeptide that corresponds to position 115 of SEQ ID NO: 1. In some embodiments, the polypeptide having protease activity comprises an amino acid sequence having at least 50%, at least 60%, at least 70%, at least 80%, at least 81%, at least 82%, at least 83%, at least 84%, at least 85%, at least 86%, at least 87%, at least 88%, at least 89%, at least 90%, at least 91%, at least 92%, at least 93%, at least 94%, at least 95%, at least 96%, at least 97%, at least 98%, or at least 99% sequence identity to SEQ ID NO: 1, provided that the amino acid sequence comprises mutations of K318A, wherein the positions correspond to SEQ ID NO: 1, and provided that the amino acid sequence comprises a cysteine (C) at a position in the polypeptide that corresponds to position 125 of SEQ ID NO: 1, a histidine (H) at a position in the polypeptide that corresponds to position 283 of SEQ ID NO: 1, an aspartic acid (D) at a position in the polypeptide that corresponds to position 305 of SEQ ID NO: 1, an aspartic acid (D) at a position in the polypeptide that corresponds to position 307 of SEQ ID NO: 1, and/or a lysine (K) at a position in the polypeptide that corresponds to position 115 of SEQ ID NO: 1. In some embodiments, the polypeptide having protease activity comprises an amino acid sequence having at least 50%, at least 60%, at least 70%, at least 80%, at least 81%, at least 82%, at least 83%, at least 84%, at least 85%, at least 86%, at least 87%, at least 88%, at least 89%, at least 90%, at least 91%, at least 92%, at least 93%, at least 94%, at least 95%, at least 96%, at least 97%, at least 98%, or at least 99% sequence identity to SEQ ID NO: 1, provided that the amino acid sequence comprises mutations of T122S, S128A, L153P, wherein the positions correspond to SEQ ID NO: 1, and provided that the amino acid sequence comprises a cysteine (C) at a position in the polypeptide that corresponds to position 125 of SEQ ID NO: 1, a histidine (H) at a position in the polypeptide that corresponds to position 283 of SEQ ID NO: 1, an aspartic acid (D) at a position in the polypeptide that corresponds to position 305 of SEQ ID NO: 1, an aspartic acid (D) at a position in the polypeptide that corresponds to position 307 of SEQ ID NO: 1, and/or a lysine (K) at a position in the polypeptide that corresponds to position 115 of SEQ ID NO: 1. In some embodiments, the polypeptide having protease activity comprises an amino acid sequence having at least 50%, at least 60%, at least 70%, at least 80%, at least 81%, at least 82%, at least 83%, at least 84%, at least 85%, at least 86%, at least 87%, at least 88%, at least 89%, at least 90%, at least 91%, at least 92%, at least 93%, at least 94%, at least 95%, at least 96%, at least 97%, at least 98%, or at least 99% sequence identity to SEQ ID NO: 1, provided that the amino acid sequence comprises mutations of T122S, S128A, L153P, F333N, wherein the positions correspond to SEQ ID NO: 1, and provided that the amino acid sequence comprises a cysteine (C) at a position in the polypeptide that corresponds to position 125 of SEQ ID NO: 1, a histidine (H) at a position in the polypeptide that corresponds to position 283 of SEQ ID NO: 1, an aspartic acid (D) at a position in the polypeptide that corresponds to position 305 of SEQ ID NO: 1, an aspartic acid (D) at a position in the polypeptide that corresponds to position 307 of SEQ ID NO: 1, and/or a lysine (K) at a position in the polypeptide that corresponds to position 115 of SEQ ID NO: 1. In some embodiments, the polypeptide having protease activity comprises an amino acid sequence having at least 50%, at least 60%, at least 70%, at least 80%, at least 81%, at least 82%, at least 83%, at least 84%, at least 85%, at least 86%, at least 87%, at least 88%, at least 89%, at least 90%, at least 91%, at least 92%, at least 93%, at least 94%, at least 95%, at least 96%, at least 97%, at least 98%, or at least 99% sequence identity to SEQ ID NO: 1, provided that the amino acid sequence comprises mutations of D71E, A79V, T122S, S128A, L153P, F333N, wherein the positions correspond to SEQ ID NO: 1, and provided that the amino acid sequence comprises a cysteine (C) at a position in the polypeptide that corresponds to position 125 of SEQ ID NO: 1, a histidine (H) at a position in the polypeptide that corresponds to position 283 of SEQ ID NO: 1, an aspartic acid (D) at a position in the polypeptide that corresponds to position 305 of SEQ ID NO: 1, an aspartic acid (D) at a position in the polypeptide that corresponds to position 307 of SEQ ID NO: 1, and/or a lysine (K) at a position in the polypeptide that corresponds to position 115 of SEQ ID NO: 1. In some embodiments, the polypeptide having protease activity comprises an amino acid sequence having at least 50%, at least 60%, at least 70%, at least 80%, at least 81%, at least 82%, at least 83%, at least 84%, at least 85%, at least 86%, at least 87%, at least 88%, at least 89%, at least 90%, at least 91%, at least 92%, at least 93%, at least 94%, at least 95%, at least 96%, at least 97%, at least 98%, or at least 99% sequence identity to SEQ ID NO: 1, provided that the amino acid sequence comprises mutations of A79V, T122S, S128A, L153P, R189K, F333N, wherein the positions correspond to SEQ ID NO: 1, and provided that the amino acid sequence comprises a cysteine (C) at a position in the polypeptide that corresponds to position 125 of SEQ ID NO: 1, a histidine (H) at a position in the polypeptide that corresponds to position 283 of SEQ ID NO: 1, an aspartic acid (D) at a position in the polypeptide that corresponds to position 305 of SEQ ID NO: 1, an aspartic acid (D) at a position in the polypeptide that corresponds to position 307 of SEQ ID NO: 1, and/or a lysine (K) at a position in the polypeptide that corresponds to position 115 of SEQ ID NO: 1. In some embodiments, the polypeptide having protease activity comprises an amino acid sequence having at least 50%, at least 60%, at least 70%, at least 80%, at least 81%, at least 82%, at least 83%, at least 84%, at least 85%, at least 86%, at least 87%, at least 88%, at least 89%, at least 90%, at least 91%, at least 92%, at least 93%, at least 94%, at least 95%, at least 96%, at least 97%, at least 98%, or at least 99% sequence identity to SEQ ID NO: 1, provided that the amino acid sequence comprises mutations of A79V, T122S, S128A, L153P, H222Q, F333N, wherein the positions correspond to SEQ ID NO: 1, and provided that the amino acid sequence comprises a cysteine (C) at a position in the polypeptide that corresponds to position 125 of SEQ ID NO: 1, a histidine (H) at a position in the polypeptide that corresponds to position 283 of SEQ ID NO: 1, an aspartic acid (D) at a position in the polypeptide that corresponds to position 305 of SEQ ID NO: 1, an aspartic acid (D) at a position in the polypeptide that corresponds to position 307 of SEQ ID NO: 1, and/or a lysine (K) at a position in the polypeptide that corresponds to position 115 of SEQ ID NO: 1. In some embodiments, the polypeptide having protease activity comprises an amino acid sequence having at least 50%, at least 60%, at least 70%, at least 80%, at least 81%, at least 82%, at least 83%, at least 84%, at least 85%, at least 86%, at least 87%, at least 88%, at least 89%, at least 90%, at least 91%, at least 92%, at least 93%, at least 94%, at least 95%, at least 96%, at least 97%, at least 98%, or at least 99% sequence identity to SEQ ID NO: 1, provided that the amino acid sequence comprises mutations of T122S, S128A, L153P, R189K, H222Q, F333N, wherein the positions correspond to SEQ ID NO: 1, and provided that the amino acid sequence comprises a cysteine (C) at a position in the polypeptide that corresponds to position 125 of SEQ ID NO: 1, a histidine (H) at a position in the polypeptide that corresponds to position 283 of SEQ ID NO: 1, an aspartic acid (D) at a position in the polypeptide that corresponds to position 305 of SEQ ID NO: 1, an aspartic acid (D) at a position in the polypeptide that corresponds to position 307 of SEQ ID NO: 1, and/or a lysine (K) at a position in the polypeptide that corresponds to position 115 of SEQ ID NO: 1. In some embodiments, the polypeptide having protease activity comprises an amino acid sequence having at least 50%, at least 60%, at least 70%, at least 80%, at least 81%, at least 82%, at least 83%, at least 84%, at least 85%, at least 86%, at least 87%, at least 88%, at least 89%, at least 90%, at least 91%, at least 92%, at least 93%, at least 94%, at least 95%, at least 96%, at least 97%, at least 98%, or at least 99% sequence identity to SEQ ID NO: 1, provided that the amino acid sequence comprises mutations of A79V, T122S, S128A, L153P, A167T, F333N, wherein the positions correspond to SEQ ID NO: 1, and provided that the amino acid sequence comprises a cysteine (C) at a position in the polypeptide that corresponds to position 125 of SEQ ID NO: 1, a histidine (H) at a position in the polypeptide that corresponds to position 283 of SEQ ID NO: 1, an aspartic acid (D) at a position in the polypeptide that corresponds to position 305 of SEQ ID NO: 1, an aspartic acid (D) at a position in the polypeptide that corresponds to position 307 of SEQ ID NO: 1, and/or a lysine (K) at a position in the polypeptide that corresponds to position 115 of SEQ ID NO: 1. In some embodiments, the polypeptide having protease activity comprises an amino acid sequence having at least 50%, at least 60%, at least 70%, at least 80%, at least 81%, at least 82%, at least 83%, at least 84%, at least 85%, at least 86%, at least 87%, at least 88%, at least 89%, at least 90%, at least 91%, at least 92%, at least 93%, at least 94%, at least 95%, at least 96%, at least 97%, at least 98%, or at least 99% sequence identity to SEQ ID NO: 1, provided that the amino acid sequence comprises mutations of A79V, T122S, S128A, L153P, R189K, H222Q, wherein the positions correspond to SEQ ID NO: 1, and provided that the amino acid sequence comprises a cysteine (C) at a position in the polypeptide that corresponds to position 125 of SEQ ID NO: 1, a histidine (H) at a position in the polypeptide that corresponds to position 283 of SEQ ID NO: 1, an aspartic acid (D) at a position in the polypeptide that corresponds to position 305 of SEQ ID NO: 1, an aspartic acid (D) at a position in the polypeptide that corresponds to position 307 of SEQ ID NO: 1, and/or a lysine (K) at a position in the polypeptide that corresponds to position 115 of SEQ ID NO: 1. In some embodiments, the polypeptide having protease activity comprises an amino acid sequence having at least 50%, at least 60%, at least 70%, at least 80%, at least 81%, at least 82%, at least 83%, at least 84%, at least 85%, at least 86%, at least 87%, at least 88%, at least 89%, at least 90%, at least 91%, at least 92%, at least 93%, at least 94%, at least 95%, at least 96%, at least 97%, at least 98%, or at least 99% sequence identity to SEQ ID NO: 1, provided that the amino acid sequence comprises mutations of A79V, T122S, S128A, L153P, A167T, H222Q, wherein the positions correspond to SEQ ID NO: 1, and provided that the amino acid sequence comprises a cysteine (C) at a position in the polypeptide that corresponds to position 125 of SEQ ID NO: 1, a histidine (H) at a position in the polypeptide that corresponds to position 283 of SEQ ID NO: 1, an aspartic acid (D) at a position in the polypeptide that corresponds to position 305 of SEQ ID NO: 1, an aspartic acid (D) at a position in the polypeptide that corresponds to position 307 of SEQ ID NO: 1, and/or a lysine (K) at a position in the polypeptide that corresponds to position 115 of SEQ ID NO: 1. In some embodiments, the polypeptide having protease activity comprises an amino acid sequence having at least 50%, at least 60%, at least 70%, at least 80%, at least 81%, at least 82%, at least 83%, at least 84%, at least 85%, at least 86%, at least 87%, at least 88%, at least 89%, at least 90%, at least 91%, at least 92%, at least 93%, at least 94%, at least 95%, at least 96%, at least 97%, at least 98%, or at least 99% sequence identity to SEQ ID NO: 1, provided that the amino acid sequence comprises mutations of A79V, V102A, T122S, S128A, L153P, A167T, wherein the positions correspond to SEQ ID NO: 1, and provided that the amino acid sequence comprises a cysteine (C) at a position in the polypeptide that corresponds to position 125 of SEQ ID NO: 1, a histidine (H) at a position in the polypeptide that corresponds to position 283 of SEQ ID NO: 1, an aspartic acid (D) at a position in the polypeptide that corresponds to position 305 of SEQ ID NO: 1, an aspartic acid (D) at a position in the polypeptide that corresponds to position 307 of SEQ ID NO: 1, and/or a lysine (K) at a position in the polypeptide that corresponds to position 115 of SEQ ID NO: 1. In some embodiments, the polypeptide having protease activity comprises an amino acid sequence having at least 50%, at least 60%, at least 70%, at least 80%, at least 81%, at least 82%, at least 83%, at least 84%, at least 85%, at least 86%, at least 87%, at least 88%, at least 89%, at least 90%, at least 91%, at least 92%, at least 93%, at least 94%, at least 95%, at least 96%, at least 97%, at least 98%, or at least 99% sequence identity to SEQ ID NO: 1, provided that the amino acid sequence comprises mutations of D71E, A79V, T122S, S128A, L153P, A167T, wherein the positions correspond to SEQ ID NO: 1, and provided that the amino acid sequence comprises a cysteine (C) at a position in the polypeptide that corresponds to position 125 of SEQ ID NO: 1, a histidine (H) at a position in the polypeptide that corresponds to position 283 of SEQ ID NO: 1, an aspartic acid (D) at a position in the polypeptide that corresponds to position 305 of SEQ ID NO: 1, an aspartic acid (D) at a position in the polypeptide that corresponds to position 307 of SEQ ID NO: 1, and/or a lysine (K) at a position in the polypeptide that corresponds to position 115 of SEQ ID NO: 1. In some embodiments, the polypeptide having protease activity comprises an amino acid sequence having at least 50%, at least 60%, at least 70%, at least 80%, at least 81%, at least 82%, at least 83%, at least 84%, at least 85%, at least 86%, at least 87%, at least 88%, at least 89%, at least 90%, at least 91%, at least 92%, at least 93%, at least 94%, at least 95%, at least 96%, at least 97%, at least 98%, or at least 99% sequence identity to SEQ ID NO: 1, provided that the amino acid sequence comprises mutations of T122S, S128A, L153P, N162E, F333N, wherein the positions correspond to SEQ ID NO: 1, and provided that the amino acid sequence comprises a cysteine (C) at a position in the polypeptide that corresponds to position 125 of SEQ ID NO: 1, a histidine (H) at a position in the polypeptide that corresponds to position 283 of SEQ ID NO: 1, an aspartic acid (D) at a position in the polypeptide that corresponds to position 305 of SEQ ID NO: 1, an aspartic acid (D) at a position in the polypeptide that corresponds to position 307 of SEQ ID NO: 1, and/or a lysine (K) at a position in the polypeptide that corresponds to position 115 of SEQ ID NO: 1. In some embodiments, the polypeptide having protease activity comprises an amino acid sequence having at least 50%, at least 60%, at least 70%, at least 80%, at least 81%, at least 82%, at least 83%, at least 84%, at least 85%, at least 86%, at least 87%, at least 88%, at least 89%, at least 90%, at least 91%, at least 92%, at least 93%, at least 94%, at least 95%, at least 96%, at least 97%, at least 98%, or at least 99% sequence identity to SEQ ID NO: 1, provided that the amino acid sequence comprises mutations of T122S, S128A, L153P, K318A, F333N, wherein the positions correspond to SEQ ID NO: 1, and provided that the amino acid sequence comprises a cysteine (C) at a position in the polypeptide that corresponds to position 125 of SEQ ID NO: 1, a histidine (H) at a position in the polypeptide that corresponds to position 283 of SEQ ID NO: 1, an aspartic acid (D) at a position in the polypeptide that corresponds to position 305 of SEQ ID NO: 1, an aspartic acid (D) at a position in the polypeptide that corresponds to position 307 of SEQ ID NO: 1, and/or a lysine (K) at a position in the polypeptide that corresponds to position 115 of SEQ ID NO: 1. In some embodiments, the polypeptide having protease activity comprises an amino acid sequence having at least 50%, at least 60%, at least 70%, at least 80%, at least 81%, at least 82%, at least 83%, at least 84%, at least 85%, at least 86%, at least 87%, at least 88%, at least 89%, at least 90%, at least 91%, at least 92%, at least 93%, at least 94%, at least 95%, at least 96%, at least 97%, at least 98%, or at least 99% sequence identity to SEQ ID NO: 1, provided that the amino acid sequence comprises mutations of T122S, S128A, L153P, H222Q, K229E, R280E, F333N, wherein the positions correspond to SEQ ID NO: 1, and provided that the amino acid sequence comprises a cysteine (C) at a position in the polypeptide that corresponds to position 125 of SEQ ID NO: 1, a histidine (H) at a position in the polypeptide that corresponds to position 283 of SEQ ID NO: 1, an aspartic acid (D) at a position in the polypeptide that corresponds to position 305 of SEQ ID NO: 1, an aspartic acid (D) at a position in the polypeptide that corresponds to position 307 of SEQ ID NO: 1, and/or a lysine (K) at a position in the polypeptide that corresponds to position 115 of SEQ ID NO: 1. In some embodiments, the polypeptide having protease activity comprises an amino acid sequence having at least 50%, at least 60%, at least 70%, at least 80%, at least 81%, at least 82%, at least 83%, at least 84%, at least 85%, at least 86%, at least 87%, at least 88%, at least 89%, at least 90%, at least 91%, at least 92%, at least 93%, at least 94%, at least 95%, at least 96%, at least 97%, at least 98%, or at least 99% sequence identity to SEQ ID NO: 1, provided that the amino acid sequence comprises mutations of S128A, L153P, H222Q, K229E, F333N, wherein the positions correspond to SEQ ID NO: 1, and provided that the amino acid sequence comprises a cysteine (C) at a position in the polypeptide that corresponds to position 125 of SEQ ID NO: 1, a histidine (H) at a position in the polypeptide that corresponds to position 283 of SEQ ID NO: 1, an aspartic acid (D) at a position in the polypeptide that corresponds to position 305 of SEQ ID NO: 1, an aspartic acid (D) at a position in the polypeptide that corresponds to position 307 of SEQ ID NO: 1, and/or a lysine (K) at a position in the polypeptide that corresponds to position 115 of SEQ ID NO: 1. In some embodiments, the polypeptide having protease activity comprises an amino acid sequence having at least 50%, at least 60%, at least 70%, at least 80%, at least 81%, at least 82%, at least 83%, at least 84%, at least 85%, at least 86%, at least 87%, at least 88%, at least 89%, at least 90%, at least 91%, at least 92%, at least 93%, at least 94%, at least 95%, at least 96%, at least 97%, at least 98%, or at least 99% sequence identity to SEQ ID NO: 1, provided that the amino acid sequence comprises mutations of S128A, L153P, H222Q, R280E, F333N, wherein the positions correspond to SEQ ID NO: 1, and provided that the amino acid sequence comprises a cysteine (C) at a position in the polypeptide that corresponds to position 125 of SEQ ID NO: 1, a histidine (H) at a position in the polypeptide that corresponds to position 283 of SEQ ID NO: 1, an aspartic acid (D) at a position in the polypeptide that corresponds to position 305 of SEQ ID NO: 1, an aspartic acid (D) at a position in the polypeptide that corresponds to position 307 of SEQ ID NO: 1, and/or a lysine (K) at a position in the polypeptide that corresponds to position 115 of SEQ ID NO: 1. In some embodiments, the polypeptide having protease activity comprises an amino acid sequence having at least 50%, at least 60%, at least 70%, at least 80%, at least 81%, at least 82%, at least 83%, at least 84%, at least 85%, at least 86%, at least 87%, at least 88%, at least 89%, at least 90%, at least 91%, at least 92%, at least 93%, at least 94%, at least 95%, at least 96%, at least 97%, at least 98%, or at least 99% sequence identity to SEQ ID NO: 1, provided that the amino acid sequence comprises mutations of S128A, L153P, K229E, R280E, F333N, wherein the positions correspond to SEQ ID NO: 1, and provided that the amino acid sequence comprises a cysteine (C) at a position in the polypeptide that corresponds to position 125 of SEQ ID NO: 1, a histidine (H) at a position in the polypeptide that corresponds to position 283 of SEQ ID NO: 1, an aspartic acid (D) at a position in the polypeptide that corresponds to position 305 of SEQ ID NO: 1, an aspartic acid (D) at a position in the polypeptide that corresponds to position 307 of SEQ ID NO: 1, and/or a lysine (K) at a position in the polypeptide that corresponds to position 115 of SEQ ID NO: 1. In some embodiments, the polypeptide having protease activity comprises an amino acid sequence having at least 50%, at least 60%, at least 70%, at least 80%, at least 81%, at least 82%, at least 83%, at least 84%, at least 85%, at least 86%, at least 87%, at least 88%, at least 89%, at least 90%, at least 91%, at least 92%, at least 93%, at least 94%, at least 95%, at least 96%, at least 97%, at least 98%, or at least 99% sequence identity to SEQ ID NO: 1, provided that the amino acid sequence comprises mutations of T122S, S128A, L153P, N162E, H222Q, K229E, R280E, F333N, wherein the positions correspond to SEQ ID NO: 1, and provided that the amino acid sequence comprises a cysteine (C) at a position in the polypeptide that corresponds to position 125 of SEQ ID NO: 1, a histidine (H) at a position in the polypeptide that corresponds to position 283 of SEQ ID NO: 1, an aspartic acid (D) at a position in the polypeptide that corresponds to position 305 of SEQ ID NO: 1, an aspartic acid (D) at a position in the polypeptide that corresponds to position 307 of SEQ ID NO: 1, and/or a lysine (K) at a position in the polypeptide that corresponds to position 115 of SEQ ID NO: 1. In some embodiments, the polypeptide having protease activity comprises an amino acid sequence having at least 50%, at least 60%, at least 70%, at least 80%, at least 81%, at least 82%, at least 83%, at least 84%, at least 85%, at least 86%, at least 87%, at least 88%, at least 89%, at least 90%, at least 91%, at least 92%, at least 93%, at least 94%, at least 95%, at least 96%, at least 97%, at least 98%, or at least 99% sequence identity to SEQ ID NO: 1, provided that the amino acid sequence comprises mutations of S128A, L153P, N162E, K196S, F333N, wherein the positions correspond to SEQ ID NO: 1, and provided that the amino acid sequence comprises a cysteine (C) at a position in the polypeptide that corresponds to position 125 of SEQ ID NO: 1, a histidine (H) at a position in the polypeptide that corresponds to position 283 of SEQ ID NO: 1, an aspartic acid (D) at a position in the polypeptide that corresponds to position 305 of SEQ ID NO: 1, an aspartic acid (D) at a position in the polypeptide that corresponds to position 307 of SEQ ID NO: 1, and/or a lysine (K) at a position in the polypeptide that corresponds to position 115 of SEQ ID NO: 1. In some embodiments, the polypeptide having protease activity comprises an amino acid sequence having at least 50%, at least 60%, at least 70%, at least 80%, at least 81%, at least 82%, at least 83%, at least 84%, at least 85%, at least 86%, at least 87%, at least 88%, at least 89%, at least 90%, at least 91%, at least 92%, at least 93%, at least 94%, at least 95%, at least 96%, at least 97%, at least 98%, or at least 99% sequence identity to SEQ ID NO: 1, provided that the amino acid sequence comprises mutations of S128A, L153P, N162E, H222Q, F333N, wherein the positions correspond to SEQ ID NO: 1, and provided that the amino acid sequence comprises a cysteine (C) at a position in the polypeptide that corresponds to position 125 of SEQ ID NO: 1, a histidine (H) at a position in the polypeptide that corresponds to position 283 of SEQ ID NO: 1, an aspartic acid (D) at a position in the polypeptide that corresponds to position 305 of SEQ ID NO: 1, an aspartic acid (D) at a position in the polypeptide that corresponds to position 307 of SEQ ID NO: 1, and/or a lysine (K) at a position in the polypeptide that corresponds to position 115 of SEQ ID NO: 1. In some embodiments, the polypeptide having protease activity comprises an amino acid sequence having at least 50%, at least 60%, at least 70%, at least 80%, at least 81%, at least 82%, at least 83%, at least 84%, at least 85%, at least 86%, at least 87%, at least 88%, at least 89%, at least 90%, at least 91%, at least 92%, at least 93%, at least 94%, at least 95%, at least 96%, at least 97%, at least 98%, or at least 99% sequence identity to SEQ ID NO: 1, provided that the amino acid sequence comprises mutations of S128A, L153P, N162E, K229E, F333N, wherein the positions correspond to SEQ ID NO: 1, and provided that the amino acid sequence comprises a cysteine (C) at a position in the polypeptide that corresponds to position 125 of SEQ ID NO: 1, a histidine (H) at a position in the polypeptide that corresponds to position 283 of SEQ ID NO: 1, an aspartic acid (D) at a position in the polypeptide that corresponds to position 305 of SEQ ID NO: 1, an aspartic acid (D) at a position in the polypeptide that corresponds to position 307 of SEQ ID NO: 1, and/or a lysine (K) at a position in the polypeptide that corresponds to position 115 of SEQ ID NO: 1. In some embodiments, the polypeptide having protease activity comprises an amino acid sequence having at least 50%, at least 60%, at least 70%, at least 80%, at least 81%, at least 82%, at least 83%, at least 84%, at least 85%, at least 86%, at least 87%, at least 88%, at least 89%, at least 90%, at least 91%, at least 92%, at least 93%, at least 94%, at least 95%, at least 96%, at least 97%, at least 98%, or at least 99% sequence identity to SEQ ID NO: 1, provided that the amino acid sequence comprises mutations of S128A, L153P, N162E, R280E, F333N, wherein the positions correspond to SEQ ID NO: 1, and provided that the amino acid sequence comprises a cysteine (C) at a position in the polypeptide that corresponds to position 125 of SEQ ID NO: 1, a histidine (H) at a position in the polypeptide that corresponds to position 283 of SEQ ID NO: 1, an aspartic acid (D) at a position in the polypeptide that corresponds to position 305 of SEQ ID NO: 1, an aspartic acid (D) at a position in the polypeptide that corresponds to position 307 of SEQ ID NO: 1, and/or a lysine (K) at a position in the polypeptide that corresponds to position 115 of SEQ ID NO: 1. In some embodiments, the polypeptide having protease activity comprises an amino acid sequence having at least 50%, at least 60%, at least 70%, at least 80%, at least 81%, at least 82%, at least 83%, at least 84%, at least 85%, at least 86%, at least 87%, at least 88%, at least 89%, at least 90%, at least 91%, at least 92%, at least 93%, at least 94%, at least 95%, at least 96%, at least 97%, at least 98%, or at least 99% sequence identity to SEQ ID NO: 1, provided that the amino acid sequence comprises mutations of S128A, L153P, N162E, K318A, F333N, wherein the positions correspond to SEQ ID NO: 1, and provided that the amino acid sequence comprises a cysteine (C) at a position in the polypeptide that corresponds to position 125 of SEQ ID NO: 1, a histidine (H) at a position in the polypeptide that corresponds to position 283 of SEQ ID NO: 1, an aspartic acid (D) at a position in the polypeptide that corresponds to position 305 of SEQ ID NO: 1, an aspartic acid (D) at a position in the polypeptide that corresponds to position 307 of SEQ ID NO: 1, and/or a lysine (K) at a position in the polypeptide that corresponds to position 115 of SEQ ID NO: 1. In some embodiments, the polypeptide having protease activity comprises an amino acid sequence having at least 50%, at least 60%, at least 70%, at least 80%, at least 81%, at least 82%, at least 83%, at least 84%, at least 85%, at least 86%, at least 87%, at least 88%, at least 89%, at least 90%, at least 91%, at least 92%, at least 93%, at least 94%, at least 95%, at least 96%, at least 97%, at least 98%, or at least 99% sequence identity to SEQ ID NO: 1, provided that the amino acid sequence comprises mutations of S128A, L153P, N162E, K196S, K318A, F333N, wherein the positions correspond to SEQ ID NO: 1, and provided that the amino acid sequence comprises a cysteine (C) at a position in the polypeptide that corresponds to position 125 of SEQ ID NO: 1, a histidine (H) at a position in the polypeptide that corresponds to position 283 of SEQ ID NO: 1, an aspartic acid (D) at a position in the polypeptide that corresponds to position 305 of SEQ ID NO: 1, an aspartic acid (D) at a position in the polypeptide that corresponds to position 307 of SEQ ID NO: 1, and/or a lysine (K) at a position in the polypeptide that corresponds to position 115 of SEQ ID NO: 1. In some embodiments, the polypeptide having protease activity comprises an amino acid sequence having at least 50%, at least 60%, at least 70%, at least 80%, at least 81%, at least 82%, at least 83%, at least 84%, at least 85%, at least 86%, at least 87%, at least 88%, at least 89%, at least 90%, at least 91%, at least 92%, at least 93%, at least 94%, at least 95%, at least 96%, at least 97%, at least 98%, or at least 99% sequence identity to SEQ ID NO: 1, provided that the amino acid sequence comprises mutations of S128A, L153P, K196S, K318A, F333N, wherein the positions correspond to SEQ ID NO: 1, and provided that the amino acid sequence comprises a cysteine (C) at a position in the polypeptide that corresponds to position 125 of SEQ ID NO: 1, a histidine (H) at a position in the polypeptide that corresponds to position 283 of SEQ ID NO: 1, an aspartic acid (D) at a position in the polypeptide that corresponds to position 305 of SEQ ID NO: 1, an aspartic acid (D) at a position in the polypeptide that corresponds to position 307 of SEQ ID NO: 1, and/or a lysine (K) at a position in the polypeptide that corresponds to position 115 of SEQ ID NO: 1. In some embodiments, the polypeptide having protease activity comprises an amino acid sequence having at least 50%, at least 60%, at least 70%, at least 80%, at least 81%, at least 82%, at least 83%, at least 84%, at least 85%, at least 86%, at least 87%, at least 88%, at least 89%, at least 90%, at least 91%, at least 92%, at least 93%, at least 94%, at least 95%, at least 96%, at least 97%, at least 98%, or at least 99% sequence identity to SEQ ID NO: 1, provided that the amino acid sequence comprises mutations of S128A, L153P, N162E, F333N, wherein the positions correspond to SEQ ID NO: 1, and provided that the amino acid sequence comprises a cysteine (C) at a position in the polypeptide that corresponds to position 125 of SEQ ID NO: 1, a histidine (H) at a position in the polypeptide that corresponds to position 283 of SEQ ID NO: 1, an aspartic acid (D) at a position in the polypeptide that corresponds to position 305 of SEQ ID NO: 1, an aspartic acid (D) at a position in the polypeptide that corresponds to position 307 of SEQ ID NO: 1, and/or a lysine (K) at a position in the polypeptide that corresponds to position 115 of SEQ ID NO: 1. In some embodiments, the polypeptide having protease activity comprises an amino acid sequence having at least 50%, at least 60%, at least 70%, at least 80%, at least 81%, at least 82%, at least 83%, at least 84%, at least 85%, at least 86%, at least 87%, at least 88%, at least 89%, at least 90%, at least 91%, at least 92%, at least 93%, at least 94%, at least 95%, at least 96%, at least 97%, at least 98%, or at least 99% sequence identity to SEQ ID NO: 1, provided that the amino acid sequence comprises mutations of S128A, L153P, K196S, F333N, wherein the positions correspond to SEQ ID NO: 1, and provided that the amino acid sequence comprises a cysteine (C) at a position in the polypeptide that corresponds to position 125 of SEQ ID NO: 1, a histidine (H) at a position in the polypeptide that corresponds to position 283 of SEQ ID NO: 1, an aspartic acid (D) at a position in the polypeptide that corresponds to position 305 of SEQ ID NO: 1, an aspartic acid (D) at a position in the polypeptide that corresponds to position 307 of SEQ ID NO: 1, and/or a lysine (K) at a position in the polypeptide that corresponds to position 115 of SEQ ID NO: 1. In some embodiments, the polypeptide having protease activity comprises an amino acid sequence having at least 50%, at least 60%, at least 70%, at least 80%, at least 81%, at least 82%, at least 83%, at least 84%, at least 85%, at least 86%, at least 87%, at least 88%, at least 89%, at least 90%, at least 91%, at least 92%, at least 93%, at least 94%, at least 95%, at least 96%, at least 97%, at least 98%, or at least 99% sequence identity to SEQ ID NO: 1, provided that the amino acid sequence comprises mutations of S128A, L153P, K318A, F333N, wherein the positions correspond to SEQ ID NO: 1, and provided that the amino acid sequence comprises a cysteine (C) at a position in the polypeptide that corresponds to position 125 of SEQ ID NO: 1, a histidine (H) at a position in the polypeptide that corresponds to position 283 of SEQ ID NO: 1, an aspartic acid (D) at a position in the polypeptide that corresponds to position 305 of SEQ ID NO: 1, an aspartic acid (D) at a position in the polypeptide that corresponds to position 307 of SEQ ID NO: 1, and/or a lysine (K) at a position in the polypeptide that corresponds to position 115 of SEQ ID NO: 1. In some embodiments, the polypeptide having protease activity comprises an amino acid sequence having at least 50%, at least 60%, at least 70%, at least 80%, at least 81%, at least 82%, at least 83%, at least 84%, at least 85%, at least 86%, at least 87%, at least 88%, at least 89%, at least 90%, at least 91%, at least 92%, at least 93%, at least 94%, at least 95%, at least 96%, at least 97%, at least 98%, or at least 99% sequence identity to SEQ ID NO: 1, provided that the amino acid sequence comprises mutations of S128A, L153P, K196S, E310Q, K318A, F333N, wherein the positions correspond to SEQ ID NO: 1, and provided that the amino acid sequence comprises a cysteine (C) at a position in the polypeptide that corresponds to position 125 of SEQ ID NO: 1, a histidine (H) at a position in the polypeptide that corresponds to position 283 of SEQ ID NO: 1, an aspartic acid (D) at a position in the polypeptide that corresponds to position 305 of SEQ ID NO: 1, an aspartic acid (D) at a position in the polypeptide that corresponds to position 307 of SEQ ID NO: 1, and/or a lysine (K) at a position in the polypeptide that corresponds to position 115 of SEQ ID NO: 1. In some embodiments, the polypeptide having protease activity comprises an amino acid sequence having at least 50%, at least 60%, at least 70%, at least 80%, at least 81%, at least 82%, at least 83%, at least 84%, at least 85%, at least 86%, at least 87%, at least 88%, at least 89%, at least 90%, at least 91%, at least 92%, at least 93%, at least 94%, at least 95%, at least 96%, at least 97%, at least 98%, or at least 99% sequence identity to SEQ ID NO: 1, provided that the amino acid sequence comprises mutations of S128A, L153P, N162E, K196S, E310Q, K318A, F333N, wherein the positions correspond to SEQ ID NO: 1, and provided that the amino acid sequence comprises a cysteine (C) at a position in the polypeptide that corresponds to position 125 of SEQ ID NO: 1, a histidine (H) at a position in the polypeptide that corresponds to position 283 of SEQ ID NO: 1, an aspartic acid (D) at a position in the polypeptide that corresponds to position 305 of SEQ ID NO: 1, an aspartic acid (D) at a position in the polypeptide that corresponds to position 307 of SEQ ID NO: 1, and/or a lysine (K) at a position in the polypeptide that corresponds to position 115 of SEQ ID NO: 1. In some embodiments, the polypeptide having protease activity comprises an amino acid sequence having at least 50%, at least 60%, at least 70%, at least 80%, at least 81%, at least 82%, at least 83%, at least 84%, at least 85%, at least 86%, at least 87%, at least 88%, at least 89%, at least 90%, at least 91%, at least 92%, at least 93%, at least 94%, at least 95%, at least 96%, at least 97%, at least 98%, or at least 99% sequence identity to SEQ ID NO: 1, provided that the amino acid sequence comprises mutations of T122S, S128A, L153P, N162E, wherein the positions correspond to SEQ ID NO: 1, and provided that the amino acid sequence comprises a cysteine (C) at a position in the polypeptide that corresponds to position 125 of SEQ ID NO: 1, a histidine (H) at a position in the polypeptide that corresponds to position 283 of SEQ ID NO: 1, an aspartic acid (D) at a position in the polypeptide that corresponds to position 305 of SEQ ID NO: 1, an aspartic acid (D) at a position in the polypeptide that corresponds to position 307 of SEQ ID NO: 1, and/or a lysine (K) at a position in the polypeptide that corresponds to position 115 of SEQ ID NO: 1. In some embodiments, the polypeptide having protease activity comprises an amino acid sequence having at least 50%, at least 60%, at least 70%, at least 80%, at least 81%, at least 82%, at least 83%, at least 84%, at least 85%, at least 86%, at least 87%, at least 88%, at least 89%, at least 90%, at least 91%, at least 92%, at least 93%, at least 94%, at least 95%, at least 96%, at least 97%, at least 98%, or at least 99% sequence identity to SEQ ID NO: 1, provided that the amino acid sequence comprises mutations of T122S, S128A, L153P, K318A, wherein the positions correspond to SEQ ID NO: 1, and provided that the amino acid sequence comprises a cysteine (C) at a position in the polypeptide that corresponds to position 125 of SEQ ID NO: 1, a histidine (H) at a position in the polypeptide that corresponds to position 283 of SEQ ID NO: 1, an aspartic acid (D) at a position in the polypeptide that corresponds to position 305 of SEQ ID NO: 1, an aspartic acid (D) at a position in the polypeptide that corresponds to position 307 of SEQ ID NO: 1, and/or a lysine (K) at a position in the polypeptide that corresponds to position 115 of SEQ ID NO: 1. In some embodiments, the polypeptide having protease activity comprises an amino acid sequence having at least 50%, at least 60%, at least 70%, at least 80%, at least 81%, at least 82%, at least 83%, at least 84%, at least 85%, at least 86%, at least 87%, at least 88%, at least 89%, at least 90%, at least 91%, at least 92%, at least 93%, at least 94%, at least 95%, at least 96%, at least 97%, at least 98%, or at least 99% sequence identity to SEQ ID NO: 1, provided that the amino acid sequence comprises mutations of T122S, S128A, L153P, H222Q, K229E, R280E, wherein the positions correspond to SEQ ID NO: 1, and provided that the amino acid sequence comprises a cysteine (C) at a position in the polypeptide that corresponds to position 125 of SEQ ID NO: 1, a histidine (H) at a position in the polypeptide that corresponds to position 283 of SEQ ID NO: 1, an aspartic acid (D) at a position in the polypeptide that corresponds to position 305 of SEQ ID NO: 1, an aspartic acid (D) at a position in the polypeptide that corresponds to position 307 of SEQ ID NO: 1, and/or a lysine (K) at a position in the polypeptide that corresponds to position 115 of SEQ ID NO: 1. In some embodiments, the polypeptide having protease activity comprises an amino acid sequence having at least 50%, at least 60%, at least 70%, at least 80%, at least 81%, at least 82%, at least 83%, at least 84%, at least 85%, at least 86%, at least 87%, at least 88%, at least 89%, at least 90%, at least 91%, at least 92%, at least 93%, at least 94%, at least 95%, at least 96%, at least 97%, at least 98%, or at least 99% sequence identity to SEQ ID NO: 1, provided that the amino acid sequence comprises mutations of T122S, S128A, L153P, H222Q, K229E, wherein the positions correspond to SEQ ID NO: 1, and provided that the amino acid sequence comprises a cysteine (C) at a position in the polypeptide that corresponds to position 125 of SEQ ID NO: 1, a histidine (H) at a position in the polypeptide that corresponds to position 283 of SEQ ID NO: 1, an aspartic acid (D) at a position in the polypeptide that corresponds to position 305 of SEQ ID NO: 1, an aspartic acid (D) at a position in the polypeptide that corresponds to position 307 of SEQ ID NO: 1, and/or a lysine (K) at a position in the polypeptide that corresponds to position 115 of SEQ ID NO: 1. In some embodiments, the polypeptide having protease activity comprises an amino acid sequence having at least 50%, at least 60%, at least 70%, at least 80%, at least 81%, at least 82%, at least 83%, at least 84%, at least 85%, at least 86%, at least 87%, at least 88%, at least 89%, at least 90%, at least 91%, at least 92%, at least 93%, at least 94%, at least 95%, at least 96%, at least 97%, at least 98%, or at least 99% sequence identity to SEQ ID NO: 1, provided that the amino acid sequence comprises mutations of T122S, S128A, L153P, H222Q, R280E, wherein the positions correspond to SEQ ID NO: 1, and provided that the amino acid sequence comprises a cysteine (C) at a position in the polypeptide that corresponds to position 125 of SEQ ID NO: 1, a histidine (H) at a position in the polypeptide that corresponds to position 283 of SEQ ID NO: 1, an aspartic acid (D) at a position in the polypeptide that corresponds to position 305 of SEQ ID NO: 1, an aspartic acid (D) at a position in the polypeptide that corresponds to position 307 of SEQ ID NO: 1, and/or a lysine (K) at a position in the polypeptide that corresponds to position 115 of SEQ ID NO: 1. In some embodiments, the polypeptide having protease activity comprises an amino acid sequence having at least 50%, at least 60%, at least 70%, at least 80%, at least 81%, at least 82%, at least 83%, at least 84%, at least 85%, at least 86%, at least 87%, at least 88%, at least 89%, at least 90%, at least 91%, at least 92%, at least 93%, at least 94%, at least 95%, at least 96%, at least 97%, at least 98%, or at least 99% sequence identity to SEQ ID NO: 1, provided that the amino acid sequence comprises mutations of T122S, S128A, L153P, K229E, R280E, wherein the positions correspond to SEQ ID NO: 1, and provided that the amino acid sequence comprises a cysteine (C) at a position in the polypeptide that corresponds to position 125 of SEQ ID NO: 1, a histidine (H) at a position in the polypeptide that corresponds to position 283 of SEQ ID NO: 1, an aspartic acid (D) at a position in the polypeptide that corresponds to position 305 of SEQ ID NO: 1, an aspartic acid (D) at a position in the polypeptide that corresponds to position 307 of SEQ ID NO: 1, and/or a lysine (K) at a position in the polypeptide that corresponds to position 115 of SEQ ID NO: 1. In some embodiments, the polypeptide having protease activity comprises an amino acid sequence having at least 50%, at least 60%, at least 70%, at least 80%, at least 81%, at least 82%, at least 83%, at least 84%, at least 85%, at least 86%, at least 87%, at least 88%, at least 89%, at least 90%, at least 91%, at least 92%, at least 93%, at least 94%, at least 95%, at least 96%, at least 97%, at least 98%, or at least 99% sequence identity to SEQ ID NO: 1, provided that the amino acid sequence comprises mutations of T122S, S128A, L153P, N162E, H222Q, K229E, R280E, wherein the positions correspond to SEQ ID NO: 1, and provided that the amino acid sequence comprises a cysteine (C) at a position in the polypeptide that corresponds to position 125 of SEQ ID NO: 1, a histidine (H) at a position in the polypeptide that corresponds to position 283 of SEQ ID NO: 1, an aspartic acid (D) at a position in the polypeptide that corresponds to position 305 of SEQ ID NO: 1, an aspartic acid (D) at a position in the polypeptide that corresponds to position 307 of SEQ ID NO: 1, and/or a lysine (K) at a position in the polypeptide that corresponds to position 115 of SEQ ID NO: 1. In some embodiments, the polypeptide having protease activity comprises an amino acid sequence having at least 50%, at least 60%, at least 70%, at least 80%, at least 81%, at least 82%, at least 83%, at least 84%, at least 85%, at least 86%, at least 87%, at least 88%, at least 89%, at least 90%, at least 91%, at least 92%, at least 93%, at least 94%, at least 95%, at least 96%, at least 97%, at least 98%, or at least 99% sequence identity to SEQ ID NO: 1, provided that the amino acid sequence comprises mutations of T122S, S128A, L153P, N162E, K196S, wherein the positions correspond to SEQ ID NO: 1, and provided that the amino acid sequence comprises a cysteine (C) at a position in the polypeptide that corresponds to position 125 of SEQ ID NO: 1, a histidine (H) at a position in the polypeptide that corresponds to position 283 of SEQ ID NO: 1, an aspartic acid (D) at a position in the polypeptide that corresponds to position 305 of SEQ ID NO: 1, an aspartic acid (D) at a position in the polypeptide that corresponds to position 307 of SEQ ID NO: 1, and/or a lysine (K) at a position in the polypeptide that corresponds to position 115 of SEQ ID NO: 1. In some embodiments, the polypeptide having protease activity comprises an amino acid sequence having at least 50%, at least 60%, at least 70%, at least 80%, at least 81%, at least 82%, at least 83%, at least 84%, at least 85%, at least 86%, at least 87%, at least 88%, at least 89%, at least 90%, at least 91%, at least 92%, at least 93%, at least 94%, at least 95%, at least 96%, at least 97%, at least 98%, or at least 99% sequence identity to SEQ ID NO: 1, provided that the amino acid sequence comprises mutations of T122S, S128A, L153P, N162E, H222Q, wherein the positions correspond to SEQ ID NO: 1, and provided that the amino acid sequence comprises a cysteine (C) at a position in the polypeptide that corresponds to position 125 of SEQ ID NO: 1, a histidine (H) at a position in the polypeptide that corresponds to position 283 of SEQ ID NO: 1, an aspartic acid (D) at a position in the polypeptide that corresponds to position 305 of SEQ ID NO: 1, an aspartic acid (D) at a position in the polypeptide that corresponds to position 307 of SEQ ID NO: 1, and/or a lysine (K) at a position in the polypeptide that corresponds to position 115 of SEQ ID NO: 1. In some embodiments, the polypeptide having protease activity comprises an amino acid sequence having at least 50%, at least 60%, at least 70%, at least 80%, at least 81%, at least 82%, at least 83%, at least 84%, at least 85%, at least 86%, at least 87%, at least 88%, at least 89%, at least 90%, at least 91%, at least 92%, at least 93%, at least 94%, at least 95%, at least 96%, at least 97%, at least 98%, or at least 99% sequence identity to SEQ ID NO: 1, provided that the amino acid sequence comprises mutations of T122S, S128A, L153P, N162E, K229E, wherein the positions correspond to SEQ ID NO: 1, and provided that the amino acid sequence comprises a cysteine (C) at a position in the polypeptide that corresponds to position 125 of SEQ ID NO: 1, a histidine (H) at a position in the polypeptide that corresponds to position 283 of SEQ ID NO: 1, an aspartic acid (D) at a position in the polypeptide that corresponds to position 305 of SEQ ID NO: 1, an aspartic acid (D) at a position in the polypeptide that corresponds to position 307 of SEQ ID NO: 1, and/or a lysine (K) at a position in the polypeptide that corresponds to position 115 of SEQ ID NO: 1. In some embodiments, the polypeptide having protease activity comprises an amino acid sequence having at least 50%, at least 60%, at least 70%, at least 80%, at least 81%, at least 82%, at least 83%, at least 84%, at least 85%, at least 86%, at least 87%, at least 88%, at least 89%, at least 90%, at least 91%, at least 92%, at least 93%, at least 94%, at least 95%, at least 96%, at least 97%, at least 98%, or at least 99% sequence identity to SEQ ID NO: 1, provided that the amino acid sequence comprises mutations of T122S, S128A, L153P, N162E, R280E, wherein the positions correspond to SEQ ID NO: 1, and provided that the amino acid sequence comprises a cysteine (C) at a position in the polypeptide that corresponds to position 125 of SEQ ID NO: 1, a histidine (H) at a position in the polypeptide that corresponds to position 283 of SEQ ID NO: 1, an aspartic acid (D) at a position in the polypeptide that corresponds to position 305 of SEQ ID NO: 1, an aspartic acid (D) at a position in the polypeptide that corresponds to position 307 of SEQ ID NO: 1, and/or a lysine (K) at a position in the polypeptide that corresponds to position 115 of SEQ ID NO: 1. In some embodiments, the polypeptide having protease activity comprises an amino acid sequence having at least 50%, at least 60%, at least 70%, at least 80%, at least 81%, at least 82%, at least 83%, at least 84%, at least 85%, at least 86%, at least 87%, at least 88%, at least 89%, at least 90%, at least 91%, at least 92%, at least 93%, at least 94%, at least 95%, at least 96%, at least 97%, at least 98%, or at least 99% sequence identity to SEQ ID NO: 1, provided that the amino acid sequence comprises mutations of T122S, S128A, L153P, N162E, K318A, wherein the positions correspond to SEQ ID NO: 1, and provided that the amino acid sequence comprises a cysteine (C) at a position in the polypeptide that corresponds to position 125 of SEQ ID NO: 1, a histidine (H) at a position in the polypeptide that corresponds to position 283 of SEQ ID NO: 1, an aspartic acid (D) at a position in the polypeptide that corresponds to position 305 of SEQ ID NO: 1, an aspartic acid (D) at a position in the polypeptide that corresponds to position 307 of SEQ ID NO: 1, and/or a lysine (K) at a position in the polypeptide that corresponds to position 115 of SEQ ID NO: 1. In some embodiments, the polypeptide having protease activity comprises an amino acid sequence having at least 50%, at least 60%, at least 70%, at least 80%, at least 81%, at least 82%, at least 83%, at least 84%, at least 85%, at least 86%, at least 87%, at least 88%, at least 89%, at least 90%, at least 91%, at least 92%, at least 93%, at least 94%, at least 95%, at least 96%, at least 97%, at least 98%, or at least 99% sequence identity to SEQ ID NO: 1, provided that the amino acid sequence comprises mutations of T122S, S128A, L153P, N162E, K196S, K318A, wherein the positions correspond to SEQ ID NO: 1, and provided that the amino acid sequence comprises a cysteine (C) at a position in the polypeptide that corresponds to position 125 of SEQ ID NO: 1, a histidine (H) at a position in the polypeptide that corresponds to position 283 of SEQ ID NO: 1, an aspartic acid (D) at a position in the polypeptide that corresponds to position 305 of SEQ ID NO: 1, an aspartic acid (D) at a position in the polypeptide that corresponds to position 307 of SEQ ID NO: 1, and/or a lysine (K) at a position in the polypeptide that corresponds to position 115 of SEQ ID NO: 1. In some embodiments, the polypeptide having protease activity comprises an amino acid sequence having at least 50%, at least 60%, at least 70%, at least 80%, at least 81%, at least 82%, at least 83%, at least 84%, at least 85%, at least 86%, at least 87%, at least 88%, at least 89%, at least 90%, at least 91%, at least 92%, at least 93%, at least 94%, at least 95%, at least 96%, at least 97%, at least 98%, or at least 99% sequence identity to SEQ ID NO: 1, provided that the amino acid sequence comprises mutations of T122S, S128A, L153P, K196S, K318A, wherein the positions correspond to SEQ ID NO: 1, and provided that the amino acid sequence comprises a cysteine (C) at a position in the polypeptide that corresponds to position 125 of SEQ ID NO: 1, a histidine (H) at a position in the polypeptide that corresponds to position 283 of SEQ ID NO: 1, an aspartic acid (D) at a position in the polypeptide that corresponds to position 305 of SEQ ID NO: 1, an aspartic acid (D) at a position in the polypeptide that corresponds to position 307 of SEQ ID NO: 1, and/or a lysine (K) at a position in the polypeptide that corresponds to position 115 of SEQ ID NO: 1. In some embodiments, the polypeptide having protease activity comprises an amino acid sequence having at least 50%, at least 60%, at least 70%, at least 80%, at least 81%, at least 82%, at least 83%, at least 84%, at least 85%, at least 86%, at least 87%, at least 88%, at least 89%, at least 90%, at least 91%, at least 92%, at least 93%, at least 94%, at least 95%, at least 96%, at least 97%, at least 98%, or at least 99% sequence identity to SEQ ID NO: 1, provided that the amino acid sequence comprises mutations of T122S, S128A, L153P, K196S, wherein the positions correspond to SEQ ID NO: 1, and provided that the amino acid sequence comprises a cysteine (C) at a position in the polypeptide that corresponds to position 125 of SEQ ID NO: 1, a histidine (H) at a position in the polypeptide that corresponds to position 283 of SEQ ID NO: 1, an aspartic acid (D) at a position in the polypeptide that corresponds to position 305 of SEQ ID NO: 1, an aspartic acid (D) at a position in the polypeptide that corresponds to position 307 of SEQ ID NO: 1, and/or a lysine (K) at a position in the polypeptide that corresponds to position 115 of SEQ ID NO: 1. In some embodiments, the polypeptide having protease activity comprises an amino acid sequence having at least 50%, at least 60%, at least 70%, at least 80%, at least 81%, at least 82%, at least 83%, at least 84%, at least 85%, at least 86%, at least 87%, at least 88%, at least 89%, at least 90%, at least 91%, at least 92%, at least 93%, at least 94%, at least 95%, at least 96%, at least 97%, at least 98%, or at least 99% sequence identity to SEQ ID NO: 1, provided that the amino acid sequence comprises mutations of T122S, S128A, L153P, K196S, Y212F, K318A, wherein the positions correspond to SEQ ID NO: 1, and provided that the amino acid sequence comprises a cysteine (C) at a position in the polypeptide that corresponds to position 125 of SEQ ID NO: 1, a histidine (H) at a position in the polypeptide that corresponds to position 283 of SEQ ID NO: 1, an aspartic acid (D) at a position in the polypeptide that corresponds to position 305 of SEQ ID NO: 1, an aspartic acid (D) at a position in the polypeptide that corresponds to position 307 of SEQ ID NO: 1, and/or a lysine (K) at a position in the polypeptide that corresponds to position 115 of SEQ ID NO: 1. In some embodiments, the polypeptide having protease activity comprises an amino acid sequence having at least 50%, at least 60%, at least 70%, at least 80%, at least 81%, at least 82%, at least 83%, at least 84%, at least 85%, at least 86%, at least 87%, at least 88%, at least 89%, at least 90%, at least 91%, at least 92%, at least 93%, at least 94%, at least 95%, at least 96%, at least 97%, at least 98%, or at least 99% sequence identity to SEQ ID NO: 1, provided that the amino acid sequence comprises mutations of T122S, S128A, L153P, K196S, E310Q, K318A, wherein the positions correspond to SEQ ID NO: 1, and provided that the amino acid sequence comprises a cysteine (C) at a position in the polypeptide that corresponds to position 125 of SEQ ID NO: 1, a histidine (H) at a position in the polypeptide that corresponds to position 283 of SEQ ID NO: 1, an aspartic acid (D) at a position in the polypeptide that corresponds to position 305 of SEQ ID NO: 1, an aspartic acid (D) at a position in the polypeptide that corresponds to position 307 of SEQ ID NO: 1, and/or a lysine (K) at a position in the polypeptide that corresponds to position 115 of SEQ ID NO: 1. In some embodiments, the polypeptide having protease activity comprises an amino acid sequence having at least 50%, at least 60%, at least 70%, at least 80%, at least 81%, at least 82%, at least 83%, at least 84%, at least 85%, at least 86%, at least 87%, at least 88%, at least 89%, at least 90%, at least 91%, at least 92%, at least 93%, at least 94%, at least 95%, at least 96%, at least 97%, at least 98%, or at least 99% sequence identity to SEQ ID NO: 1, provided that the amino acid sequence comprises mutations of T122S, S128A, L153P, N162E, K196S, E310Q, K318A, wherein the positions correspond to SEQ ID NO: 1, and provided that the amino acid sequence comprises a cysteine (C) at a position in the polypeptide that corresponds to position 125 of SEQ ID NO: 1, a histidine (H) at a position in the polypeptide that corresponds to position 283 of SEQ ID NO: 1, an aspartic acid (D) at a position in the polypeptide that corresponds to position 305 of SEQ ID NO: 1, an aspartic acid (D) at a position in the polypeptide that corresponds to position 307 of SEQ ID NO: 1, and/or a lysine (K) at a position in the polypeptide that corresponds to position 115 of SEQ ID NO: 1. In some embodiments, the polypeptide having protease activity comprises an amino acid sequence having at least 50%, at least 60%, at least 70%, at least 80%, at least 81%, at least 82%, at least 83%, at least 84%, at least 85%, at least 86%, at least 87%, at least 88%, at least 89%, at least 90%, at least 91%, at least 92%, at least 93%, at least 94%, at least 95%, at least 96%, at least 97%, at least 98%, or at least 99% sequence identity to SEQ ID NO: 1, provided that the amino acid sequence comprises mutations of S128A, L153P, E166D, F333N, wherein the positions correspond to SEQ ID NO: 1, and provided that the amino acid sequence comprises a cysteine (C) at a position in the polypeptide that corresponds to position 125 of SEQ ID NO: 1, a histidine (H) at a position in the polypeptide that corresponds to position 283 of SEQ ID NO: 1, an aspartic acid (D) at a position in the polypeptide that corresponds to position 305 of SEQ ID NO: 1, an aspartic acid (D) at a position in the polypeptide that corresponds to position 307 of SEQ ID NO: 1, and/or a lysine (K) at a position in the polypeptide that corresponds to position 115 of SEQ ID NO: 1. In some embodiments, the polypeptide having protease activity comprises an amino acid sequence having at least 50%, at least 60%, at least 70%, at least 80%, at least 81%, at least 82%, at least 83%, at least 84%, at least 85%, at least 86%, at least 87%, at least 88%, at least 89%, at least 90%, at least 91%, at least 92%, at least 93%, at least 94%, at least 95%, at least 96%, at least 97%, at least 98%, or at least 99% sequence identity to SEQ ID NO: 1, provided that the amino acid sequence comprises mutations of S128A, L153P, K196T, F333N, wherein the positions correspond to SEQ ID NO: 1, and provided that the amino acid sequence comprises a cysteine (C) at a position in the polypeptide that corresponds to position 125 of SEQ ID NO: 1, a histidine (H) at a position in the polypeptide that corresponds to position 283 of SEQ ID NO: 1, an aspartic acid (D) at a position in the polypeptide that corresponds to position 305 of SEQ ID NO: 1, an aspartic acid (D) at a position in the polypeptide that corresponds to position 307 of SEQ ID NO: 1, and/or a lysine (K) at a position in the polypeptide that corresponds to position 115 of SEQ ID NO: 1. In some embodiments, the polypeptide having protease activity comprises an amino acid sequence having at least 50%, at least 60%, at least 70%, at least 80%, at least 81%, at least 82%, at least 83%, at least 84%, at least 85%, at least 86%, at least 87%, at least 88%, at least 89%, at least 90%, at least 91%, at least 92%, at least 93%, at least 94%, at least 95%, at least 96%, at least 97%, at least 98%, or at least 99% sequence identity to SEQ ID NO: 1, provided that the amino acid sequence comprises mutations of S128A, L153P, K196D, F333N, wherein the positions correspond to SEQ ID NO: 1, and provided that the amino acid sequence comprises a cysteine (C) at a position in the polypeptide that corresponds to position 125 of SEQ ID NO: 1, a histidine (H) at a position in the polypeptide that corresponds to position 283 of SEQ ID NO: 1, an aspartic acid (D) at a position in the polypeptide that corresponds to position 305 of SEQ ID NO: 1, an aspartic acid (D) at a position in the polypeptide that corresponds to position 307 of SEQ ID NO: 1, and/or a lysine (K) at a position in the polypeptide that corresponds to position 115 of SEQ ID NO: 1. In some embodiments, the polypeptide having protease activity comprises an amino acid sequence having at least 50%, at least 60%, at least 70%, at least 80%, at least 81%, at least 82%, at least 83%, at least 84%, at least 85%, at least 86%, at least 87%, at least 88%, at least 89%, at least 90%, at least 91%, at least 92%, at least 93%, at least 94%, at least 95%, at least 96%, at least 97%, at least 98%, or at least 99% sequence identity to SEQ ID NO: 1, provided that the amino acid sequence comprises mutations of S128A, L153P, K196N, F333N, wherein the positions correspond to SEQ ID NO: 1, and provided that the amino acid sequence comprises a cysteine (C) at a position in the polypeptide that corresponds to position 125 of SEQ ID NO: 1, a histidine (H) at a position in the polypeptide that corresponds to position 283 of SEQ ID NO: 1, an aspartic acid (D) at a position in the polypeptide that corresponds to position 305 of SEQ ID NO: 1, an aspartic acid (D) at a position in the polypeptide that corresponds to position 307 of SEQ ID NO: 1, and/or a lysine (K) at a position in the polypeptide that corresponds to position 115 of SEQ ID NO: 1. In some embodiments, the polypeptide having protease activity comprises an amino acid sequence having at least 50%, at least 60%, at least 70%, at least 80%, at least 81%, at least 82%, at least 83%, at least 84%, at least 85%, at least 86%, at least 87%, at least 88%, at least 89%, at least 90%, at least 91%, at least 92%, at least 93%, at least 94%, at least 95%, at least 96%, at least 97%, at least 98%, or at least 99% sequence identity to SEQ ID NO: 1, provided that the amino acid sequence comprises mutations of S128A, L153P, H222S, F333N, wherein the positions correspond to SEQ ID NO: 1, and provided that the amino acid sequence comprises a cysteine (C) at a position in the polypeptide that corresponds to position 125 of SEQ ID NO: 1, a histidine (H) at a position in the polypeptide that corresponds to position 283 of SEQ ID NO: 1, an aspartic acid (D) at a position in the polypeptide that corresponds to position 305 of SEQ ID NO: 1, an aspartic acid (D) at a position in the polypeptide that corresponds to position 307 of SEQ ID NO: 1, and/or a lysine (K) at a position in the polypeptide that corresponds to position 115 of SEQ ID NO: 1. In some embodiments, the polypeptide having protease activity comprises an amino acid sequence having at least 50%, at least 60%, at least 70%, at least 80%, at least 81%, at least 82%, at least 83%, at least 84%, at least 85%, at least 86%, at least 87%, at least 88%, at least 89%, at least 90%, at least 91%, at least 92%, at least 93%, at least 94%, at least 95%, at least 96%, at least 97%, at least 98%, or at least 99% sequence identity to SEQ ID NO: 1, provided that the amino acid sequence comprises mutations of S128A, L153P, H222E, F333N, wherein the positions correspond to SEQ ID NO: 1, and provided that the amino acid sequence comprises a cysteine (C) at a position in the polypeptide that corresponds to position 125 of SEQ ID NO: 1, a histidine (H) at a position in the polypeptide that corresponds to position 283 of SEQ ID NO: 1, an aspartic acid (D) at a position in the polypeptide that corresponds to position 305 of SEQ ID NO: 1, an aspartic acid (D) at a position in the polypeptide that corresponds to position 307 of SEQ ID NO: 1, and/or a lysine (K) at a position in the polypeptide that corresponds to position 115 of SEQ ID NO: 1. In some embodiments, the polypeptide having protease activity comprises an amino acid sequence having at least 50%, at least 60%, at least 70%, at least 80%, at least 81%, at least 82%, at least 83%, at least 84%, at least 85%, at least 86%, at least 87%, at least 88%, at least 89%, at least 90%, at least 91%, at least 92%, at least 93%, at least 94%, at least 95%, at least 96%, at least 97%, at least 98%, or at least 99% sequence identity to SEQ ID NO: 1, provided that the amino acid sequence comprises mutations of S128A, L153P, H222T, F333N, wherein the positions correspond to SEQ ID NO: 1, and provided that the amino acid sequence comprises a cysteine (C) at a position in the polypeptide that corresponds to position 125 of SEQ ID NO: 1, a histidine (H) at a position in the polypeptide that corresponds to position 283 of SEQ ID NO: 1, an aspartic acid (D) at a position in the polypeptide that corresponds to position 305 of SEQ ID NO: 1, an aspartic acid (D) at a position in the polypeptide that corresponds to position 307 of SEQ ID NO: 1, and/or a lysine (K) at a position in the polypeptide that corresponds to position 115 of SEQ ID NO: 1. In some embodiments, the polypeptide having protease activity comprises an amino acid sequence having at least 50%, at least 60%, at least 70%, at least 80%, at least 81%, at least 82%, at least 83%, at least 84%, at least 85%, at least 86%, at least 87%, at least 88%, at least 89%, at least 90%, at least 91%, at least 92%, at least 93%, at least 94%, at least 95%, at least 96%, at least 97%, at least 98%, or at least 99% sequence identity to SEQ ID NO: 1, provided that the amino acid sequence comprises mutations of E120D, S128A, L153P, F333N, wherein the positions correspond to SEQ ID NO: 1, and provided that the amino acid sequence comprises a cysteine (C) at a position in the polypeptide that corresponds to position 125 of SEQ ID NO: 1, a histidine (H) at a position in the polypeptide that corresponds to position 283 of SEQ ID NO: 1, an aspartic acid (D) at a position in the polypeptide that corresponds to position 305 of SEQ ID NO: 1, an aspartic acid (D) at a position in the polypeptide that corresponds to position 307 of SEQ ID NO: 1, and/or a lysine (K) at a position in the polypeptide that corresponds to position 115 of SEQ ID NO: 1. In some embodiments, the polypeptide having protease activity comprises an amino acid sequence having at least 50%, at least 60%, at least 70%, at least 80%, at least 81%, at least 82%, at least 83%, at least 84%, at least 85%, at least 86%, at least 87%, at least 88%, at least 89%, at least 90%, at least 91%, at least 92%, at least 93%, at least 94%, at least 95%, at least 96%, at least 97%, at least 98%, or at least 99% sequence identity to SEQ ID NO: 1, provided that the amino acid sequence comprises mutations of T122E, S128A, L153P, F333N, wherein the positions correspond to SEQ ID NO: 1, and provided that the amino acid sequence comprises a cysteine (C) at a position in the polypeptide that corresponds to position 125 of SEQ ID NO: 1, a histidine (H) at a position in the polypeptide that corresponds to position 283 of SEQ ID NO: 1, an aspartic acid (D) at a position in the polypeptide that corresponds to position 305 of SEQ ID NO: 1, an aspartic acid (D) at a position in the polypeptide that corresponds to position 307 of SEQ ID NO: 1, and/or a lysine (K) at a position in the polypeptide that corresponds to position 115 of SEQ ID NO: 1. In some embodiments, the polypeptide having protease activity comprises an amino acid sequence having at least 50%, at least 60%, at least 70%, at least 80%, at least 81%, at least 82%, at least 83%, at least 84%, at least 85%, at least 86%, at least 87%, at least 88%, at least 89%, at least 90%, at least 91%, at least 92%, at least 93%, at least 94%, at least 95%, at least 96%, at least 97%, at least 98%, or at least 99% sequence identity to SEQ ID NO: 1, provided that the amino acid sequence comprises mutations of T122N, S128A, L153P, F333N, wherein the positions correspond to SEQ ID NO: 1, and provided that the amino acid sequence comprises a cysteine (C) at a position in the polypeptide that corresponds to position 125 of SEQ ID NO: 1, a histidine (H) at a position in the polypeptide that corresponds to position 283 of SEQ ID NO: 1, an aspartic acid (D) at a position in the polypeptide that corresponds to position 305 of SEQ ID NO: 1, an aspartic acid (D) at a position in the polypeptide that corresponds to position 307 of SEQ ID NO: 1, and/or a lysine (K) at a position in the polypeptide that corresponds to position 115 of SEQ ID NO: 1. In some embodiments, the polypeptide having protease activity comprises an amino acid sequence having at least 50%, at least 60%, at least 70%, at least 80%, at least 81%, at least 82%, at least 83%, at least 84%, at least 85%, at least 86%, at least 87%, at least 88%, at least 89%, at least 90%, at least 91%, at least 92%, at least 93%, at least 94%, at least 95%, at least 96%, at least 97%, at least 98%, or at least 99% sequence identity to SEQ ID NO: 1, provided that the amino acid sequence comprises mutations of S128A, L153P, K229D, F333N, wherein the positions correspond to SEQ ID NO: 1, and provided that the amino acid sequence comprises a cysteine (C) at a position in the polypeptide that corresponds to position 125 of SEQ ID NO: 1, a histidine (H) at a position in the polypeptide that corresponds to position 283 of SEQ ID NO: 1, an aspartic acid (D) at a position in the polypeptide that corresponds to position 305 of SEQ ID NO: 1, an aspartic acid (D) at a position in the polypeptide that corresponds to position 307 of SEQ ID NO: 1, and/or a lysine (K) at a position in the polypeptide that corresponds to position 115 of SEQ ID NO: 1. In some embodiments, the polypeptide having protease activity comprises an amino acid sequence having at least 50%, at least 60%, at least 70%, at least 80%, at least 81%, at least 82%, at least 83%, at least 84%, at least 85%, at least 86%, at least 87%, at least 88%, at least 89%, at least 90%, at least 91%, at least 92%, at least 93%, at least 94%, at least 95%, at least 96%, at least 97%, at least 98%, or at least 99% sequence identity to SEQ ID NO: 1, provided that the amino acid sequence comprises mutations of S128A, L153P, K229N, F333N, wherein the positions correspond to SEQ ID NO: 1, and provided that the amino acid sequence comprises a cysteine (C) at a position in the polypeptide that corresponds to position 125 of SEQ ID NO: 1, a histidine (H) at a position in the polypeptide that corresponds to position 283 of SEQ ID NO: 1, an aspartic acid (D) at a position in the polypeptide that corresponds to position 305 of SEQ ID NO: 1, an aspartic acid (D) at a position in the polypeptide that corresponds to position 307 of SEQ ID NO: 1, and/or a lysine (K) at a position in the polypeptide that corresponds to position 115 of SEQ ID NO: 1. In some embodiments, the polypeptide having protease activity comprises an amino acid sequence having at least 50%, at least 60%, at least 70%, at least 80%, at least 81%, at least 82%, at least 83%, at least 84%, at least 85%, at least 86%, at least 87%, at least 88%, at least 89%, at least 90%, at least 91%, at least 92%, at least 93%, at least 94%, at least 95%, at least 96%, at least 97%, at least 98%, or at least 99% sequence identity to SEQ ID NO: 1, provided that the amino acid sequence comprises mutations of S128A, L153P, N162D, F333N, wherein the positions correspond to SEQ ID NO: 1, and provided that the amino acid sequence comprises a cysteine (C) at a position in the polypeptide that corresponds to position 125 of SEQ ID NO: 1, a histidine (H) at a position in the polypeptide that corresponds to position 283 of SEQ ID NO: 1, an aspartic acid (D) at a position in the polypeptide that corresponds to position 305 of SEQ ID NO: 1, an aspartic acid (D) at a position in the polypeptide that corresponds to position 307 of SEQ ID NO: 1, and/or a lysine (K) at a position in the polypeptide that corresponds to position 115 of SEQ ID NO: 1. In some embodiments, the polypeptide having protease activity comprises an amino acid sequence having at least 50%, at least 60%, at least 70%, at least 80%, at least 81%, at least 82%, at least 83%, at least 84%, at least 85%, at least 86%, at least 87%, at least 88%, at least 89%, at least 90%, at least 91%, at least 92%, at least 93%, at least 94%, at least 95%, at least 96%, at least 97%, at least 98%, or at least 99% sequence identity to SEQ ID NO: 1, provided that the amino acid sequence comprises mutations of S128A, L153P, R280D, F333N, wherein the positions correspond to SEQ ID NO: 1, and provided that the amino acid sequence comprises a cysteine (C) at a position in the polypeptide that corresponds to position 125 of SEQ ID NO: 1, a histidine (H) at a position in the polypeptide that corresponds to position 283 of SEQ ID NO: 1, an aspartic acid (D) at a position in the polypeptide that corresponds to position 305 of SEQ ID NO: 1, an aspartic acid (D) at a position in the polypeptide that corresponds to position 307 of SEQ ID NO: 1, and/or a lysine (K) at a position in the polypeptide that corresponds to position 115 of SEQ ID NO: 1. In some embodiments, the polypeptide having protease activity comprises an amino acid sequence having at least 50%, at least 60%, at least 70%, at least 80%, at least 81%, at least 82%, at least 83%, at least 84%, at least 85%, at least 86%, at least 87%, at least 88%, at least 89%, at least 90%, at least 91%, at least 92%, at least 93%, at least 94%, at least 95%, at least 96%, at least 97%, at least 98%, or at least 99% sequence identity to SEQ ID NO: 1, provided that the amino acid sequence comprises mutations of S128A, L153P, R280A, F333N, wherein the positions correspond to SEQ ID NO: 1, and provided that the amino acid sequence comprises a cysteine ID NO: 1, and/or a lysine (K) at a position in the polypeptide that corresponds to position 115 of SEQ ID NO: 1. In some embodiments, the polypeptide having protease activity comprises an amino acid sequence having at least 50%, at least 60%, at least 70%, at least 80%, at least 81%, at least 82%, at least 83%, at least 84%, at least 85%, at least 86%, at least 87%, at least 88%, at least 89%, at least 90%, at least 91%, at least 92%, at least 93%, at least 94%, at least 95%, at least 96%, at least 97%, at least 98%, or at least 99% sequence identity to SEQ ID NO: 1, provided that the amino acid sequence comprises mutations of S128A, L153P, R280Y, F333N, wherein the positions correspond to SEQ ID NO: 1, and provided that the amino acid sequence comprises a cysteine (C) at a position in the polypeptide that corresponds to position 125 of SEQ ID NO: 1, a histidine (H) at a position in the polypeptide that corresponds to position 283 of SEQ ID NO: 1, an aspartic acid (D) at a position in the polypeptide that corresponds to position 305 of SEQ ID NO: 1, an aspartic acid (D) at a position in the polypeptide that corresponds to position 307 of SEQ ID NO: 1, and/or a lysine (K) at a position in the polypeptide that corresponds to position 115 of SEQ ID NO: 1. In some embodiments, the polypeptide having protease activity comprises an amino acid sequence having at least 50%, at least 60%, at least 70%, at least 80%, at least 81%, at least 82%, at least 83%, at least 84%, at least 85%, at least 86%, at least 87%, at least 88%, at least 89%, at least 90%, at least 91%, at least 92%, at least 93%, at least 94%, at least 95%, at least 96%, at least 97%, at least 98%, or at least 99% sequence identity to SEQ ID NO: 1, provided that the amino acid sequence comprises mutations of S128A, L153P, R280N, F333N, wherein the positions correspond to SEQ ID NO: 1, and provided that the amino acid sequence comprises a cysteine (C) at a position in the polypeptide that corresponds to position 125 of SEQ ID NO: 1, a histidine (H) at a position in the polypeptide that corresponds to position 283 of SEQ ID NO: 1, an aspartic acid (D) at a position in the polypeptide that corresponds to position 305 of SEQ ID NO: 1, an aspartic acid (D) at a position in the polypeptide that corresponds to position 307 of SEQ ID NO: 1, and/or a lysine (K) at a position in the polypeptide that corresponds to position 115 of SEQ ID NO: 1. In some embodiments, the polypeptide having protease activity comprises an amino acid sequence having at least 50%, at least 60%, at least 70%, at least 80%, at least 81%, at least 82%, at least 83%, at least 84%, at least 85%, at least 86%, at least 87%, at least 88%, at least 89%, at least 90%, at least 91%, at least 92%, at least 93%, at least 94%, at least 95%, at least 96%, at least 97%, at least 98%, or at least 99% sequence identity to SEQ ID NO: 1, provided that the amino acid sequence comprises mutations of S128A, L153P, R280T, F333N, wherein the positions correspond to SEQ ID NO: 1, and provided that the amino acid sequence comprises a cysteine (C) at a position in the polypeptide that corresponds to position 125 of SEQ ID NO: 1, a histidine (H) at a position in the polypeptide that corresponds to position 283 of SEQ ID NO: 1, an aspartic acid (D) at a position in the polypeptide that corresponds to position 305 of SEQ ID NO: 1, an aspartic acid (D) at a position in the polypeptide that corresponds to position 307 of SEQ ID NO: 1, and/or a lysine (K) at a position in the polypeptide that corresponds to position 115 of SEQ ID NO: 1. In some embodiments, the polypeptide having protease activity comprises an amino acid sequence having at least 50%, at least 60%, at least 70%, at least 80%, at least 81%, at least 82%, at least 83%, at least 84%, at least 85%, at least 86%, at least 87%, at least 88%, at least 89%, at least 90%, at least 91%, at least 92%, at least 93%, at least 94%, at least 95%, at least 96%, at least 97%, at least 98%, or at least 99% sequence identity to SEQ ID NO: 1, provided that the amino acid sequence comprises mutations of S128A, L153P, K324I, F333N, wherein the positions correspond to SEQ ID NO: 1, and provided that the amino acid sequence comprises a cysteine (C) at a position in the polypeptide that corresponds to position 125 of SEQ ID NO: 1, a histidine (H) at a position in the polypeptide that corresponds to position 283 of SEQ ID NO: 1, an aspartic acid (D) at a position in the polypeptide that corresponds to position 305 of SEQ ID NO: 1, an aspartic acid (D) at a position in the polypeptide that corresponds to position 307 of SEQ ID NO: 1, and/or a lysine (K) at a position in the polypeptide that corresponds to position 115 of SEQ ID NO: 1. In some embodiments, the polypeptide having protease activity comprises an amino acid sequence having at least 50%, at least 60%, at least 70%, at least 80%, at least 81%, at least 82%, at least 83%, at least 84%, at least 85%, at least 86%, at least 87%, at least 88%, at least 89%, at least 90%, at least 91%, at least 92%, at least 93%, at least 94%, at least 95%, at least 96%, at least 97%, at least 98%, or at least 99% sequence identity to SEQ ID NO: 1, provided that the amino acid sequence comprises mutations of S128A, L153P, E310D, F333N, wherein the positions correspond to SEQ ID NO: 1, and provided that the amino acid sequence comprises a cysteine (C) at a position in the polypeptide that corresponds to position 125 of SEQ ID NO: 1, a histidine (H) at a position in the polypeptide that corresponds to position 283 of SEQ ID NO: 1, an aspartic acid (D) at a position in the polypeptide that corresponds to position 305 of SEQ ID NO: 1, an aspartic acid (D) at a position in the polypeptide that corresponds to position 307 of SEQ ID NO: 1, and/or a lysine (K) at a position in the polypeptide that corresponds to position 115 of SEQ ID NO: 1. In some embodiments, the polypeptide having protease activity comprises an amino acid sequence having at least 50%, at least 60%, at least 70%, at least 80%, at least 81%, at least 82%, at least 83%, at least 84%, at least 85%, at least 86%, at least 87%, at least 88%, at least 89%, at least 90%, at least 91%, at least 92%, at least 93%, at least 94%, at least 95%, at least 96%, at least 97%, at least 98%, or at least 99% sequence identity to SEQ ID NO: 1, provided that the amino acid sequence comprises mutations of S128A, L153P, E310N, F333N, wherein the positions correspond to SEQ ID NO: 1, and provided that the amino acid sequence comprises a cysteine (C) at a position in the polypeptide that corresponds to position 125 of SEQ ID NO: 1, a histidine (H) at a position in the polypeptide that corresponds to position 283 of SEQ ID NO: 1, an aspartic acid (D) at a position in the polypeptide that corresponds to position 305 of SEQ ID NO: 1, an aspartic acid (D) at a position in the polypeptide that corresponds to position 307 of SEQ ID NO: 1, and/or a lysine (K) at a position in the polypeptide that corresponds to position 115 of SEQ ID NO: 1. In some embodiments, the polypeptide having protease activity comprises an amino acid sequence having at least 50%, at least 60%, at least 70%, at least 80%, at least 81%, at least 82%, at least 83%, at least 84%, at least 85%, at least 86%, at least 87%, at least 88%, at least 89%, at least 90%, at least 91%, at least 92%, at least 93%, at least 94%, at least 95%, at least 96%, at least 97%, at least 98%, or at least 99% sequence identity to SEQ ID NO: 1, provided that the amino acid sequence comprises mutations of S128A, L153P, E310S, F333N, wherein the positions correspond to SEQ ID NO: 1, and provided that the amino acid sequence comprises a cysteine (C) at a position in the polypeptide that corresponds to position 125 of SEQ ID NO: 1, a histidine (H) at a position in the polypeptide that corresponds to position 283 of SEQ ID NO: 1, an aspartic acid (D) at a position in the polypeptide that corresponds to position 305 of SEQ ID NO: 1, an aspartic acid (D) at a position in the polypeptide that corresponds to position 307 of SEQ ID NO: 1, and/or a lysine (K) at a position in the polypeptide that corresponds to position 115 of SEQ ID NO: 1. In some embodiments, the polypeptide having protease activity comprises an amino acid sequence having at least 50%, at least 60%, at least 70%, at least 80%, at least 81%, at least 82%, at least 83%, at least 84%, at least 85%, at least 86%, at least 87%, at least 88%, at least 89%, at least 90%, at least 91%, at least 92%, at least 93%, at least 94%, at least 95%, at least 96%, at least 97%, at least 98%, or at least 99% sequence identity to SEQ ID NO: 1, provided that the amino acid sequence comprises mutations of S128A, L153P, K318N, F333N, wherein the positions correspond to SEQ ID NO: 1, and provided that the amino acid sequence comprises a cysteine (C) at a position in the polypeptide that corresponds to position 125 of SEQ ID NO: 1, a histidine (H) at a position in the polypeptide that corresponds to position 283 of SEQ ID NO: 1, an aspartic acid (D) at a position in the polypeptide that corresponds to position 305 of SEQ ID NO: 1, an aspartic acid (D) at a position in the polypeptide that corresponds to position 307 of SEQ ID NO: 1, and/or a lysine (K) at a position in the polypeptide that corresponds to position 115 of SEQ ID NO: 1. In some embodiments, the polypeptide having protease activity comprises an amino acid sequence having at least 50%, at least 60%, at least 70%, at least 80%, at least 81%, at least 82%, at least 83%, at least 84%, at least 85%, at least 86%, at least 87%, at least 88%, at least 89%, at least 90%, at least 91%, at least 92%, at least 93%, at least 94%, at least 95%, at least 96%, at least 97%, at least 98%, or at least 99% sequence identity to SEQ ID NO: 1, provided that the amino acid sequence comprises mutations of S128A, L153P, K318E, F333N, wherein the positions correspond to SEQ ID NO: 1, and provided that the amino acid sequence comprises a cysteine (C) at a position in the polypeptide that corresponds to position 125 of SEQ ID NO: 1, a histidine (H) at a position in the polypeptide that corresponds to position 283 of SEQ ID NO: 1, an aspartic acid (D) at a position in the polypeptide that corresponds to position 305 of SEQ ID NO: 1, an aspartic acid (D) at a position in the polypeptide that corresponds to position 307 of SEQ ID NO: 1, and/or a lysine (K) at a position in the polypeptide that corresponds to position 115 of SEQ ID NO: 1. In some embodiments, the polypeptide having protease activity comprises an amino acid sequence having at least 50%, at least 60%, at least 70%, at least 80%, at least 81%, at least 82%, at least 83%, at least 84%, at least 85%, at least 86%, at least 87%, at least 88%, at least 89%, at least 90%, at least 91%, at least 92%, at least 93%, at least 94%, at least 95%, at least 96%, at least 97%, at least 98%, or at least 99% sequence identity to SEQ ID NO: 1, provided that the amino acid sequence comprises mutations of S128A, L153P, K318D, F333N, wherein the positions correspond to SEQ ID NO: 1, and provided that the amino acid sequence comprises a cysteine (C) at a position in the polypeptide that corresponds to position 125 of SEQ ID NO: 1, a histidine (H) at a position in the polypeptide that corresponds to position 283 of SEQ ID NO: 1, an aspartic acid (D) at a position in the polypeptide that corresponds to position 305 of SEQ ID NO: 1, an aspartic acid (D) at a position in the polypeptide that corresponds to position 307 of SEQ ID NO: 1, and/or a lysine (K) at a position in the polypeptide that corresponds to position 115 of SEQ ID NO: 1. In some embodiments, the polypeptide having protease activity comprises an amino acid sequence having at least 50%, at least 60%, at least 70%, at least 80%, at least 81%, at least 82%, at least 83%, at least 84%, at least 85%, at least 86%, at least 87%, at least 88%, at least 89%, at least 90%, at least 91%, at least 92%, at least 93%, at least 94%, at least 95%, at least 96%, at least 97%, at least 98%, or at least 99% sequence identity to SEQ ID NO: 1, provided that the amino acid sequence comprises mutations of S128A, L153P, K318Q, F333N, wherein the positions correspond to SEQ ID NO: 1, and provided that the amino acid sequence comprises a cysteine (C) at a position in the polypeptide that corresponds to position 125 of SEQ ID NO: 1, a histidine (H) at a position in the polypeptide that corresponds to position 283 of SEQ ID NO: 1, an aspartic acid (D) at a position in the polypeptide that corresponds to position 305 of SEQ ID NO: 1, an aspartic acid (D) at a position in the polypeptide that corresponds to position 307 of SEQ ID NO: 1, and/or a lysine (K) at a position in the polypeptide that corresponds to position 115 of SEQ ID NO: 1. In some embodiments, the polypeptide having protease activity comprises an amino acid sequence having at least 50%, at least 60%, at least 70%, at least 80%, at least 81%, at least 82%, at least 83%, at least 84%, at least 85%, at least 86%, at least 87%, at least 88%, at least 89%, at least 90%, at least 91%, at least 92%, at least 93%, at least 94%, at least 95%, at least 96%, at least 97%, at least 98%, or at least 99% sequence identity to SEQ ID NO: 1, provided that the amino acid sequence comprises mutations of S128A, L153P, K318P, F333N, wherein the positions correspond to SEQ ID NO: 1, and provided that the amino acid sequence comprises a cysteine (C) at a position in the polypeptide that corresponds to position 125 of SEQ ID NO: 1, a histidine (H) at a position in the polypeptide that corresponds to position 283 of SEQ ID NO: 1, an aspartic acid (D) at a position in the polypeptide that corresponds to position 305 of SEQ ID NO: 1, an aspartic acid (D) at a position in the polypeptide that corresponds to position 307 of SEQ ID NO: 1, and/or a lysine (K) at a position in the polypeptide that corresponds to position 115 of SEQ ID NO: 1. In some embodiments, the polypeptide having protease activity comprises an amino acid sequence having at least 50%, at least 60%, at least 70%, at least 80%, at least 81%, at least 82%, at least 83%, at least 84%, at least 85%, at least 86%, at least 87%, at least 88%, at least 89%, at least 90%, at least 91%, at least 92%, at least 93%, at least 94%, at least 95%, at least 96%, at least 97%, at least 98%, or at least 99% sequence identity to SEQ ID NO: 1, provided that the amino acid sequence comprises mutations of S128A, L153P, K318F, F333N, wherein the positions correspond to SEQ ID NO: 1, and provided that the amino acid sequence comprises a cysteine (C) at a position in the polypeptide that corresponds to position 125 of SEQ ID NO: 1, a histidine (H) at a position in the polypeptide that corresponds to position 283 of SEQ ID NO: 1, an aspartic acid (D) at a position in the polypeptide that corresponds to position 305 of SEQ ID NO: 1, an aspartic acid (D) at a position in the polypeptide that corresponds to position 307 of SEQ ID NO: 1, and/or a lysine (K) at a position in the polypeptide that corresponds to position 115 of SEQ ID NO: 1. In some embodiments, the polypeptide having protease activity comprises an amino acid sequence having at least 50%, at least 60%, at least 70%, at least 80%, at least 81%, at least 82%, at least 83%, at least 84%, at least 85%, at least 86%, at least 87%, at least 88%, at least 89%, at least 90%, at least 91%, at least 92%, at least 93%, at least 94%, at least 95%, at least 96%, at least 97%, at least 98%, or at least 99% sequence identity to SEQ ID NO: 1, provided that the amino acid sequence comprises mutations of S128A, L153P, K318V, F333N, wherein the positions correspond to SEQ ID NO: 1, and provided that the amino acid sequence comprises a cysteine (C) at a position in the polypeptide that corresponds to position 125 of SEQ ID NO: 1, a histidine (H) at a position in the polypeptide that corresponds to position 283 of SEQ ID NO: 1, an aspartic acid (D) at a position in the polypeptide that corresponds to position 305 of SEQ ID NO: 1, an aspartic acid (D) at a position in the polypeptide that corresponds to position 307 of SEQ ID NO: 1, and/or a lysine (K) at a position in the polypeptide that corresponds to position 115 of SEQ ID NO: 1. In some embodiments, the polypeptide having protease activity comprises an amino acid sequence having at least 50%, at least 60%, at least 70%, at least 80%, at least 81%, at least 82%, at least 83%, at least 84%, at least 85%, at least 86%, at least 87%, at least 88%, at least 89%, at least 90%, at least 91%, at least 92%, at least 93%, at least 94%, at least 95%, at least 96%, at least 97%, at least 98%, or at least 99% sequence identity to SEQ ID NO: 1, provided that the amino acid sequence comprises mutations of S128A, L153P, K318L, F333N, wherein the positions correspond to SEQ ID NO: 1, and provided that the amino acid sequence comprises a cysteine (C) at a position in the polypeptide that corresponds to position 125 of SEQ ID NO: 1, a histidine (H) at a position in the polypeptide that corresponds to position 283 of SEQ ID NO: 1, an aspartic acid (D) at a position in the polypeptide that corresponds to position 305 of SEQ ID NO: 1, an aspartic acid (D) at a position in the polypeptide that corresponds to position 307 of SEQ ID NO: 1, and/or a lysine (K) at a position in the polypeptide that corresponds to position 115 of SEQ ID NO: 1. In some embodiments, the polypeptide having protease activity comprises an amino acid sequence having at least 50%, at least 60%, at least 70%, at least 80%, at least 81%, at least 82%, at least 83%, at least 84%, at least 85%, at least 86%, at least 87%, at least 88%, at least 89%, at least 90%, at least 91%, at least 92%, at least 93%, at least 94%, at least 95%, at least 96%, at least 97%, at least 98%, or at least 99% sequence identity to SEQ ID NO: 1, provided that the amino acid sequence comprises mutations of S128A, L153P, K318S, F333N, wherein the positions correspond to SEQ ID NO: 1, and provided that the amino acid sequence comprises a cysteine (C) at a position in the polypeptide that corresponds to position 125 of SEQ ID NO: 1, a histidine (H) at a position in the polypeptide that corresponds to position 283 of SEQ ID NO: 1, an aspartic acid (D) at a position in the polypeptide that corresponds to position 305 of SEQ ID NO: 1, an aspartic acid (D) at a position in the polypeptide that corresponds to position 307 of SEQ ID NO: 1, and/or a lysine (K) at a position in the polypeptide that corresponds to position 115 of SEQ ID NO: 1. In some embodiments, the polypeptide having protease activity comprises an amino acid sequence having at least 50%, at least 60%, at least 70%, at least 80%, at least 81%, at least 82%, at least 83%, at least 84%, at least 85%, at least 86%, at least 87%, at least 88%, at least 89%, at least 90%, at least 91%, at least 92%, at least 93%, at least 94%, at least 95%, at least 96%, at least 97%, at least 98%, or at least 99% sequence identity to SEQ ID NO: 1, provided that the amino acid sequence comprises mutations of S128A, L153P, K318I, F333N, wherein the positions correspond to SEQ ID NO: 1, and provided that the amino acid sequence comprises a cysteine (C) at a position in the polypeptide that corresponds to position 125 of SEQ ID NO: 1, a histidine (H) at a position in the polypeptide that corresponds to position 283 of SEQ ID NO: 1, an aspartic acid (D) at a position in the polypeptide that corresponds to position 305 of SEQ ID NO: 1, an aspartic acid (D) at a position in the polypeptide that corresponds to position 307 of SEQ ID NO: 1, and/or a lysine (K) at a position in the polypeptide that corresponds to position 115 of SEQ ID NO: 1. In some embodiments, the polypeptide having protease activity comprises an amino acid sequence having at least 50%, at least 60%, at least 70%, at least 80%, at least 81%, at least 82%, at least 83%, at least 84%, at least 85%, at least 86%, at least 87%, at least 88%, at least 89%, at least 90%, at least 91%, at least 92%, at least 93%, at least 94%, at least 95%, at least 96%, at least 97%, at least 98%, or at least 99% sequence identity to SEQ ID NO: 1, provided that the amino acid sequence comprises mutations of S128A, L153P, K201E, F333N, wherein the positions correspond to SEQ ID NO: 1, and provided that the amino acid sequence comprises a cysteine (C) at a position in the polypeptide that corresponds to position 125 of SEQ ID NO: 1, a histidine (H) at a position in the polypeptide that corresponds to position 283 of SEQ ID NO: 1, an aspartic acid (D) at a position in the polypeptide that corresponds to position 305 of SEQ ID NO: 1, an aspartic acid (D) at a position in the polypeptide that corresponds to position 307 of SEQ ID NO: 1, and/or a lysine (K) at a position in the polypeptide that corresponds to position 115 of SEQ ID NO: 1. In some embodiments, the polypeptide having protease activity comprises an amino acid sequence having at least 50%, at least 60%, at least 70%, at least 80%, at least 81%, at least 82%, at least 83%, at least 84%, at least 85%, at least 86%, at least 87%, at least 88%, at least 89%, at least 90%, at least 91%, at least 92%, at least 93%, at least 94%, at least 95%, at least 96%, at least 97%, at least 98%, or at least 99% sequence identity to SEQ ID NO: 1, provided that the amino acid sequence comprises mutations of S128A, L153P, K201S, F333N, wherein the positions correspond to SEQ ID NO: 1, and provided that the amino acid sequence comprises a cysteine (C) at a position in the polypeptide that corresponds to position 125 of SEQ ID NO: 1, a histidine (H) at a position in the polypeptide that corresponds to position 283 of SEQ ID NO: 1, an aspartic acid (D) at a position in the polypeptide that corresponds to position 305 of SEQ ID NO: 1, an aspartic acid (D) at a position in the polypeptide that corresponds to position 307 of SEQ ID NO: 1, and/or a lysine (K) at a position in the polypeptide that corresponds to position 115 of SEQ ID NO: 1. In some embodiments, the polypeptide having protease activity comprises an amino acid sequence having at least 50%, at least 60%, at least 70%, at least 80%, at least 81%, at least 82%, at least 83%, at least 84%, at least 85%, at least 86%, at least 87%, at least 88%, at least 89%, at least 90%, at least 91%, at least 92%, at least 93%, at least 94%, at least 95%, at least 96%, at least 97%, at least 98%, or at least 99% sequence identity to SEQ ID NO: 1, provided that the amino acid sequence comprises mutations of S128A, L153P, H197S, F333N, wherein the positions correspond to SEQ ID NO: 1, and provided that the amino acid sequence comprises a cysteine (C) at a position in the polypeptide that corresponds to position 125 of SEQ ID NO: 1, a histidine (H) at a position in the polypeptide that corresponds to position 283 of SEQ ID NO: 1, an aspartic acid (D) at a position in the polypeptide that corresponds to position 305 of SEQ ID NO: 1, an aspartic acid (D) at a position in the polypeptide that corresponds to position 307 of SEQ ID NO: 1, and/or a lysine (K) at a position in the polypeptide that corresponds to position 115 of SEQ ID NO: 1. In some embodiments, the polypeptide having protease activity comprises an amino acid sequence having at least 50%, at least 60%, at least 70%, at least 80%, at least 81%, at least 82%, at least 83%, at least 84%, at least 85%, at least 86%, at least 87%, at least 88%, at least 89%, at least 90%, at least 91%, at least 92%, at least 93%, at least 94%, at least 95%, at least 96%, at least 97%, at least 98%, or at least 99% sequence identity to SEQ ID NO: 1, provided that the amino acid sequence comprises mutations of S128A, L153P, K160E, F333N, wherein the positions correspond to SEQ ID NO: 1, and provided that the amino acid sequence comprises a cysteine (C) at a position in the polypeptide that corresponds to position 125 of SEQ ID NO: 1, a histidine (H) at a position in the polypeptide that corresponds to position 283 of SEQ ID NO: 1, an aspartic acid (D) at a position in the polypeptide that corresponds to position 305 of SEQ ID NO: 1, an aspartic acid (D) at a position in the polypeptide that corresponds to position 307 of SEQ ID NO: 1, and/or a lysine (K) at a position in the polypeptide that corresponds to position 115 of SEQ ID NO: 1. In some embodiments, the polypeptide having protease activity comprises an amino acid sequence having at least 50%, at least 60%, at least 70%, at least 80%, at least 81%, at least 82%, at least 83%, at least 84%, at least 85%, at least 86%, at least 87%, at least 88%, at least 89%, at least 90%, at least 91%, at least 92%, at least 93%, at least 94%, at least 95%, at least 96%, at least 97%, at least 98%, or at least 99% sequence identity to SEQ ID NO: 1, provided that the amino acid sequence comprises mutations of S128A, L153P, K165E, F333N, wherein the positions correspond to SEQ ID NO: 1, and provided that the amino acid sequence comprises a cysteine (C) at a position in the polypeptide that corresponds to position 125 of SEQ ID NO: 1, a histidine (H) at a position in the polypeptide that corresponds to position 283 of SEQ ID NO: 1, an aspartic acid (D) at a position in the polypeptide that corresponds to position 305 of SEQ ID NO: 1, an aspartic acid (D) at a position in the polypeptide that corresponds to position 307 of SEQ ID NO: 1, and/or a lysine (K) at a position in the polypeptide that corresponds to position 115 of SEQ ID NO: 1. In some embodiments, the polypeptide having protease activity comprises an amino acid sequence having at least 50%, at least 60%, at least 70%, at least 80%, at least 81%, at least 82%, at least 83%, at least 84%, at least 85%, at least 86%, at least 87%, at least 88%, at least 89%, at least 90%, at least 91%, at least 92%, at least 93%, at least 94%, at least 95%, at least 96%, at least 97%, at least 98%, or at least 99% sequence identity to SEQ ID NO: 1, provided that the amino acid sequence comprises mutations of S128A, L153P, R309G, F333N, wherein the positions correspond to SEQ ID NO: 1, and provided that the amino acid sequence comprises a cysteine (C) at a position in the polypeptide that corresponds to position 125 of SEQ ID NO: 1, a histidine (H) at a position in the polypeptide that corresponds to position 283 of SEQ ID NO: 1, an aspartic acid (D) at a position in the polypeptide that corresponds to position 305 of SEQ ID NO: 1, an aspartic acid (D) at a position in the polypeptide that corresponds to position 307 of SEQ ID NO: 1, and/or a lysine (K) at a position in the polypeptide that corresponds to position 115 of SEQ ID NO: 1. In some embodiments, the polypeptide having protease activity comprises an amino acid sequence having at least 50%, at least 60%, at least 70%, at least 80%, at least 81%, at least 82%, at least 83%, at least 84%, at least 85%, at least 86%, at least 87%, at least 88%, at least 89%, at least 90%, at least 91%, at least 92%, at least 93%, at least 94%, at least 95%, at least 96%, at least 97%, at least 98%, or at least 99% sequence identity to SEQ ID NO: 1, provided that the amino acid sequence comprises mutations of S128A, L153P, R319E, F333N, wherein the positions correspond to SEQ ID NO: 1, and provided that the amino acid sequence comprises a cysteine (C) at a position in the polypeptide that corresponds to position 125 of SEQ ID NO: 1, a histidine (H) at a position in the polypeptide that corresponds to position 283 of SEQ ID NO: 1, an aspartic acid (D) at a position in the polypeptide that corresponds to position 305 of SEQ ID NO: 1, an aspartic acid (D) at a position in the polypeptide that corresponds to position 307 of SEQ ID NO: 1, and/or a lysine (K) at a position in the polypeptide that corresponds to position 115 of SEQ ID NO: 1. In some embodiments, the polypeptide having protease activity comprises an amino acid sequence having at least 50%, at least 60%, at least 70%, at least 80%, at least 81%, at least 82%, at least 83%, at least 84%, at least 85%, at least 86%, at least 87%, at least 88%, at least 89%, at least 90%, at least 91%, at least 92%, at least 93%, at least 94%, at least 95%, at least 96%, at least 97%, at least 98%, or at least 99% sequence identity to SEQ ID NO: 1, provided that the amino acid sequence comprises mutations of S128A, L153P, R319T, F333N, wherein the positions correspond to SEQ ID NO: 1, and provided that the amino acid sequence comprises a cysteine (C) at a position in the polypeptide that corresponds to position 125 of SEQ ID NO: 1, a histidine (H) at a position in the polypeptide that corresponds to position 283 of SEQ ID NO: 1, an aspartic acid (D) at a position in the polypeptide that corresponds to position 305 of SEQ ID NO: 1, an aspartic acid (D) at a position in the polypeptide that corresponds to position 307 of SEQ ID NO: 1, and/or a lysine (K) at a position in the polypeptide that corresponds to position 115 of SEQ ID NO: 1. In some embodiments, the polypeptide having protease activity comprises an amino acid sequence having at least 50%, at least 60%, at least 70%, at least 80%, at least 81%, at least 82%, at least 83%, at least 84%, at least 85%, at least 86%, at least 87%, at least 88%, at least 89%, at least 90%, at least 91%, at least 92%, at least 93%, at least 94%, at least 95%, at least 96%, at least 97%, at least 98%, or at least 99% sequence identity to SEQ ID NO: 1, provided that the amino acid sequence comprises mutations of S128A, L153P, R320Q, F333N, wherein the positions correspond to SEQ ID NO: 1, and provided that the amino acid sequence comprises a cysteine (C) at a position in the polypeptide that corresponds to position 125 of SEQ ID NO: 1, a histidine (H) at a position in the polypeptide that corresponds to position 283 of SEQ ID NO: 1, an aspartic acid (D) at a position in the polypeptide that corresponds to position 305 of SEQ ID NO: 1, an aspartic acid (D) at a position in the polypeptide that corresponds to position 307 of SEQ ID NO: 1, and/or a lysine (K) at a position in the polypeptide that corresponds to position 115 of SEQ ID NO: 1. In some embodiments, the polypeptide having protease activity comprises an amino acid sequence having at least 50%, at least 60%, at least 70%, at least 80%, at least 81%, at least 82%, at least 83%, at least 84%, at least 85%, at least 86%, at least 87%, at least 88%, at least 89%, at least 90%, at least 91%, at least 92%, at least 93%, at least 94%, at least 95%, at least 96%, at least 97%, at least 98%, or at least 99% sequence identity to SEQ ID NO: 1, provided that the amino acid sequence comprises mutations of S128A, L153P, R320L, F333N, wherein the positions correspond to SEQ ID NO: 1, and provided that the amino acid sequence comprises a cysteine (C) at a position in the polypeptide that corresponds to position 125 of SEQ ID NO: 1, a histidine (H) at a position in the polypeptide that corresponds to position 283 of SEQ ID NO: 1, an aspartic acid (D) at a position in the polypeptide that corresponds to position 305 of SEQ ID NO: 1, an aspartic acid (D) at a position in the polypeptide that corresponds to position 307 of SEQ ID NO: 1, and/or a lysine (K) at a position in the polypeptide that corresponds to position 115 of SEQ ID NO: 1. In some embodiments, the polypeptide having protease activity comprises an amino acid sequence having at least 50%, at least 60%, at least 70%, at least 80%, at least 81%, at least 82%, at least 83%, at least 84%, at least 85%, at least 86%, at least 87%, at least 88%, at least 89%, at least 90%, at least 91%, at least 92%, at least 93%, at least 94%, at least 95%, at least 96%, at least 97%, at least 98%, or at least 99% sequence identity to SEQ ID NO: 1, provided that the amino acid sequence comprises mutations of A79V, S128A, L153P, R189K, H222Q, F333N, wherein the positions correspond to SEQ ID NO: 1, and provided that the amino acid sequence comprises a cysteine (C) at a position in the polypeptide that corresponds to position 125 of SEQ ID NO: 1, a histidine (H) at a position in the polypeptide that corresponds to position 283 of SEQ ID NO: 1, an aspartic acid (D) at a position in the polypeptide that corresponds to position 305 of SEQ ID NO: 1, an aspartic acid (D) at a position in the polypeptide that corresponds to position 307 of SEQ ID NO: 1, and/or a lysine (K) at a position in the polypeptide that corresponds to position 115 of SEQ ID NO: 1. In some embodiments, the polypeptide having protease activity comprises an amino acid sequence having at least 50%, at least 60%, at least 70%, at least 80%, at least 81%, at least 82%, at least 83%, at least 84%, at least 85%, at least 86%, at least 87%, at least 88%, at least 89%, at least 90%, at least 91%, at least 92%, at least 93%, at least 94%, at least 95%, at least 96%, at least 97%, at least 98%, or at least 99% sequence identity to SEQ ID NO: 1, provided that the amino acid sequence comprises mutations of D71E, A79V, S128A, L153P, H222Q, F333N, wherein the positions correspond to SEQ ID NO: 1, and provided that the amino acid sequence comprises a cysteine (C) at a position in the polypeptide that corresponds to position 125 of SEQ ID NO: 1, a histidine (H) at a position in the polypeptide that corresponds to position 283 of SEQ ID NO: 1, an aspartic acid (D) at a position in the polypeptide that corresponds to position 305 of SEQ ID NO: 1, an aspartic acid (D) at a position in the polypeptide that corresponds to position 307 of SEQ ID NO: 1, and/or a lysine (K) at a position in the polypeptide that corresponds to position 115 of SEQ ID NO: 1. In some embodiments, the polypeptide having protease activity comprises an amino acid sequence having at least 50%, at least 60%, at least 70%, at least 80%, at least 81%, at least 82%, at least 83%, at least 84%, at least 85%, at least 86%, at least 87%, at least 88%, at least 89%, at least 90%, at least 91%, at least 92%, at least 93%, at least 94%, at least 95%, at least 96%, at least 97%, at least 98%, or at least 99% sequence identity to SEQ ID NO: 1, provided that the amino acid sequence comprises mutations of D71E, A79V, S128A, L153P, R189K, F333N, wherein the positions correspond to SEQ ID NO: 1, and provided that the amino acid sequence comprises a cysteine (C) at a position in the polypeptide that corresponds to position 125 of SEQ ID NO: 1, a histidine (H) at a position in the polypeptide that corresponds to position 283 of SEQ ID NO: 1, an aspartic acid (D) at a position in the polypeptide that corresponds to position 305 of SEQ ID NO: 1, an aspartic acid (D) at a position in the polypeptide that corresponds to position 307 of SEQ ID NO: 1, and/or a lysine (K) at a position in the polypeptide that corresponds to position 115 of SEQ ID NO: 1. In some embodiments, the polypeptide having protease activity comprises an amino acid sequence having at least 50%, at least 60%, at least 70%, at least 80%, at least 81%, at least 82%, at least 83%, at least 84%, at least 85%, at least 86%, at least 87%, at least 88%, at least 89%, at least 90%, at least 91%, at least 92%, at least 93%, at least 94%, at least 95%, at least 96%, at least 97%, at least 98%, or at least 99% sequence identity to SEQ ID NO: 1, provided that the amino acid sequence comprises mutations of D71E, S128A, L153P, R189K, H222Q, F333N, wherein the positions correspond to SEQ ID NO: 1, and provided that the amino acid sequence comprises a cysteine (C) at a position in the polypeptide that corresponds to position 125 of SEQ ID NO: 1, a histidine (H) at a position in the polypeptide that corresponds to position 283 of SEQ ID NO: 1, an aspartic acid (D) at a position in the polypeptide that corresponds to position 305 of SEQ ID NO: 1, an aspartic acid (D) at a position in the polypeptide that corresponds to position 307 of SEQ ID NO: 1, and/or a lysine (K) at a position in the polypeptide that corresponds to position 115 of SEQ ID NO: 1. In some embodiments, the polypeptide having protease activity comprises an amino acid sequence having at least 50%, at least 60%, at least 70%, at least 80%, at least 81%, at least 82%, at least 83%, at least 84%, at least 85%, at least 86%, at least 87%, at least 88%, at least 89%, at least 90%, at least 91%, at least 92%, at least 93%, at least 94%, at least 95%, at least 96%, at least 97%, at least 98%, or at least 99% sequence identity to SEQ ID NO: 1, provided that the amino acid sequence comprises mutations of S128A, L153P, K324I, F333N, N162E, K229E, wherein the positions correspond to SEQ ID NO: 1, and provided that the amino acid sequence comprises a cysteine (C) at a position in the polypeptide that corresponds to position 125 of SEQ ID NO: 1, a histidine (H) at a position in the polypeptide that corresponds to position 283 of SEQ ID NO: 1, an aspartic acid (D) at a position in the polypeptide that corresponds to position 305 of SEQ ID NO: 1, an aspartic acid (D) at a position in the polypeptide that corresponds to position 307 of SEQ ID NO: 1, and/or a lysine (K) at a position in the polypeptide that corresponds to position 115 of SEQ ID NO: 1. In some embodiments, the polypeptide having protease activity comprises an amino acid sequence having at least 50%, at least 60%, at least 70%, at least 80%, at least 81%, at least 82%, at least 83%, at least 84%, at least 85%, at least 86%, at least 87%, at least 88%, at least 89%, at least 90%, at least 91%, at least 92%, at least 93%, at least 94%, at least 95%, at least 96%, at least 97%, at least 98%, or at least 99% sequence identity to SEQ ID NO: 1, provided that the amino acid sequence comprises mutations of S128A, L153P, K324I, F333N, N162E, K229E, K196D, wherein the positions correspond to SEQ ID NO: 1, and provided that the amino acid sequence comprises a cysteine (H) at a position in the polypeptide that corresponds to position 283 of SEQ ID NO: 1, an aspartic acid (D) at a position in the polypeptide that corresponds to position 305 of SEQ ID NO: 1, an aspartic acid (D) at a position in the polypeptide that corresponds to position 307 of SEQ ID NO: 1, and/or a lysine (K) at a position in the polypeptide that corresponds to position 115 of SEQ ID NO: 1. In some embodiments, the polypeptide having protease activity comprises an amino acid sequence having at least 50%, at least 60%, at least 70%, at least 80%, at least 81%, at least 82%, at least 83%, at least 84%, at least 85%, at least 86%, at least 87%, at least 88%, at least 89%, at least 90%, at least 91%, at least 92%, at least 93%, at least 94%, at least 95%, at least 96%, at least 97%, at least 98%, or at least 99% sequence identity to SEQ ID NO: 1, provided that the amino acid sequence comprises mutations of S128A, L153P, K324I, F333N, N162E, K229E, R280T, wherein the positions correspond to SEQ ID NO: 1, and provided that the amino acid sequence comprises a cysteine (C) at a position in the polypeptide that corresponds to position 125 of SEQ ID NO: 1, a histidine (H) at a position in the polypeptide that corresponds to position 283 of SEQ ID NO: 1, an aspartic acid (D) at a position in the polypeptide that corresponds to position 305 of SEQ ID NO: 1, an aspartic acid (D) at a position in the polypeptide that corresponds to position 307 of SEQ ID NO: 1, and/or a lysine (K) at a position in the polypeptide that corresponds to position 115 of SEQ ID NO: 1. In some embodiments, the polypeptide having protease activity comprises an amino acid sequence having at least 50%, at least 60%, at least 70%, at least 80%, at least 81%, at least 82%, at least 83%, at least 84%, at least 85%, at least 86%, at least 87%, at least 88%, at least 89%, at least 90%, at least 91%, at least 92%, at least 93%, at least 94%, at least 95%, at least 96%, at least 97%, at least 98%, or at least 99% sequence identity to SEQ ID NO: 1, provided that the amino acid sequence comprises mutations of S128A, L153P, K324I, F333N, N162E, K229E, R280T, K196D, wherein the positions correspond to SEQ ID NO: 1, and provided that the amino acid sequence comprises a cysteine (C) at a position in the polypeptide that corresponds to position 125 of SEQ ID NO: 1, a histidine (H) at a position in the polypeptide that corresponds to position 283 of SEQ ID NO: 1, an aspartic acid (D) at a position in the polypeptide that corresponds to position 305 of SEQ ID NO: 1, an aspartic acid (D) at a position in the polypeptide that corresponds to position 307 of SEQ ID NO: 1, and/or a lysine (K) at a position in the polypeptide that corresponds to position 115 of SEQ ID NO: 1. In some embodiments, the polypeptide having protease activity comprises an amino acid sequence having at least 50%, at least 60%, at least 70%, at least 80%, at least 81%, at least 82%, at least 83%, at least 84%, at least 85%, at least 86%, at least 87%, at least 88%, at least 89%, at least 90%, at least 91%, at least 92%, at least 93%, at least 94%, at least 95%, at least 96%, at least 97%, at least 98%, or at least 99% sequence identity to SEQ ID NO: 1, provided that the amino acid sequence comprises mutations of S128A, L153P, K324I, F333N, K196D, wherein the positions correspond to SEQ ID NO: 1, and provided that the amino acid sequence comprises a cysteine (C) at a position in the polypeptide that corresponds to position 125 of SEQ ID NO: 1, a histidine (H) at a position in the polypeptide that corresponds to position 283 of SEQ ID NO: 1, an aspartic acid (D) at a position in the polypeptide that corresponds to position 305 of SEQ ID NO: 1, an aspartic acid (D) at a position in the polypeptide that corresponds to position 307 of SEQ ID NO: 1, and/or a lysine (K) at a position in the polypeptide that corresponds to position 115 of SEQ ID NO: 1. In some embodiments, the polypeptide having protease activity comprises an amino acid sequence having at least 50%, at least 60%, at least 70%, at least 80%, at least 81%, at least 82%, at least 83%, at least 84%, at least 85%, at least 86%, at least 87%, at least 88%, at least 89%, at least 90%, at least 91%, at least 92%, at least 93%, at least 94%, at least 95%, at least 96%, at least 97%, at least 98%, or at least 99% sequence identity to SEQ ID NO: 1, provided that the amino acid sequence comprises mutations of S128A, L153P, K324I, F333N, R280T, wherein the positions correspond to SEQ ID NO: 1, and provided that the amino acid sequence comprises a cysteine (C) at a position in the polypeptide that corresponds to position 125 of SEQ ID NO: 1, a histidine (H) at a position in the polypeptide that corresponds to position 283 of SEQ ID NO: 1, an aspartic acid (D) at a position in the polypeptide that corresponds to position 305 of SEQ ID NO: 1, an aspartic acid (D) at a position in the polypeptide that corresponds to position 307 of SEQ ID NO: 1, and/or a lysine (K) at a position in the polypeptide that corresponds to position 115 of SEQ ID NO: 1. In some embodiments, the polypeptide having protease activity comprises an amino acid sequence having at least 50%, at least 60%, at least 70%, at least 80%, at least 81%, at least 82%, at least 83%, at least 84%, at least 85%, at least 86%, at least 87%, at least 88%, at least 89%, at least 90%, at least 91%, at least 92%, at least 93%, at least 94%, at least 95%, at least 96%, at least 97%, at least 98%, or at least 99% sequence identity to SEQ ID NO: 1, provided that the amino acid sequence comprises mutations of S128A, L153P, K324I, F333N, R280T, K196D, wherein the positions correspond to SEQ ID NO: 1, and provided that the amino acid sequence comprises a cysteine (C) at a position in the polypeptide that corresponds to position 125 of SEQ ID NO: 1, a histidine (H) at a position in the polypeptide that corresponds to position 283 of SEQ ID NO: 1, an aspartic acid (D) at a position in the polypeptide that corresponds to position 305 of SEQ ID NO: 1, an aspartic acid (D) at a position in the polypeptide that corresponds to position 307 of SEQ ID NO: 1, and/or a lysine (K) at a position in the polypeptide that corresponds to position 115 of SEQ ID NO: 1. In some embodiments, the polypeptide having protease activity comprises an amino acid sequence having at least 50%, at least 60%, at least 70%, at least 80%, at least 81%, at least 82%, at least 83%, at least 84%, at least 85%, at least 86%, at least 87%, at least 88%, at least 89%, at least 90%, at least 91%, at least 92%, at least 93%, at least 94%, at least 95%, at least 96%, at least 97%, at least 98%, or at least 99% sequence identity to SEQ ID NO: 1, provided that the amino acid sequence comprises mutations of S128A, L153P, K324I, F333N, N162E, K229E, K196S, wherein the positions correspond to SEQ ID NO: 1, and provided that the amino acid sequence comprises a cysteine (C) at a position in the polypeptide that corresponds to position 125 of SEQ ID NO: 1, a histidine (H) at a position in the polypeptide that corresponds to position 283 of SEQ ID NO: 1, an aspartic acid (D) at a position in the polypeptide that corresponds to position 305 of SEQ ID NO: 1, an aspartic acid (D) at a position in the polypeptide that corresponds to position 307 of SEQ ID NO: 1, and/or a lysine (K) at a position in the polypeptide that corresponds to position 115 of SEQ ID NO: 1. In some embodiments, the polypeptide having protease activity comprises an amino acid sequence having at least 50%, at least 60%, at least 70%, at least 80%, at least 81%, at least 82%, at least 83%, at least 84%, at least 85%, at least 86%, at least 87%, at least 88%, at least 89%, at least 90%, at least 91%, at least 92%, at least 93%, at least 94%, at least 95%, at least 96%, at least 97%, at least 98%, or at least 99% sequence identity to SEQ ID NO: 1, provided that the amino acid sequence comprises mutations of S128A, L153P, K324I, F333N, N162E, K229E, R280T, K196S, wherein the positions correspond to SEQ ID NO: 1, and provided that the amino acid sequence comprises a cysteine (C) at a position in the polypeptide that corresponds to position 125 of SEQ ID NO: 1, a histidine (H) at a position in the polypeptide that corresponds to position 283 of SEQ ID NO: 1, an aspartic acid (D) at a position in the polypeptide that corresponds to position 305 of SEQ ID NO: 1, an aspartic acid (D) at a position in the polypeptide that corresponds to position 307 of SEQ ID NO: 1, and/or a lysine (K) at a position in the polypeptide that corresponds to position 115 of SEQ ID NO: 1. In some embodiments, the polypeptide having protease activity comprises an amino acid sequence having at least 50%, at least 60%, at least 70%, at least 80%, at least 81%, at least 82%, at least 83%, at least 84%, at least 85%, at least 86%, at least 87%, at least 88%, at least 89%, at least 90%, at least 91%, at least 92%, at least 93%, at least 94%, at least 95%, at least 96%, at least 97%, at least 98%, or at least 99% sequence identity to SEQ ID NO: 1, provided that the amino acid sequence comprises mutations of S128A, L153P, K324I, F333N, N162E, K229E, R280T, H222Q, wherein the positions correspond to SEQ ID NO: 1, and provided that the amino acid sequence comprises a cysteine (C) at a position in the polypeptide that corresponds to position 125 of SEQ ID NO: 1, a histidine (H) at a position in the polypeptide that corresponds to position 283 of SEQ ID NO: 1, an aspartic acid (D) at a position in the polypeptide that corresponds to position 305 of SEQ ID NO: 1, an aspartic acid (D) at a position in the polypeptide that corresponds to position 307 of SEQ ID NO: 1, and/or a lysine (K) at a position in the polypeptide that corresponds to position 115 of SEQ ID NO: 1. In some embodiments, the polypeptide having protease activity comprises an amino acid sequence having at least 50%, at least 60%, at least 70%, at least 80%, at least 81%, at least 82%, at least 83%, at least 84%, at least 85%, at least 86%, at least 87%, at least 88%, at least 89%, at least 90%, at least 91%, at least 92%, at least 93%, at least 94%, at least 95%, at least 96%, at least 97%, at least 98%, or at least 99% sequence identity to SEQ ID NO: 1, provided that the amino acid sequence comprises mutations of S128A, L153P, K324I, F333N, N162E, K229E, R280T, H222Q, K196D, wherein the positions correspond to SEQ ID NO: 1, and provided that the amino acid sequence comprises a cysteine (C) at a position in the polypeptide that corresponds to position 125 of SEQ ID NO: 1, a histidine (H) at a position in the polypeptide that corresponds to position 283 of SEQ ID NO: 1, an aspartic acid (D) at a position in the polypeptide that corresponds to position 305 of SEQ ID NO: 1, an aspartic acid (D) at a position in the polypeptide that corresponds to position 307 of SEQ ID NO: 1, and/or a lysine (K) at a position in the polypeptide that corresponds to position 115 of SEQ ID NO: 1. In some embodiments, the polypeptide having protease activity comprises an amino acid sequence having at least 50%, at least 60%, at least 70%, at least 80%, at least 81%, at least 82%, at least 83%, at least 84%, at least 85%, at least 86%, at least 87%, at least 88%, at least 89%, at least 90%, at least 91%, at least 92%, at least 93%, at least 94%, at least 95%, at least 96%, at least 97%, at least 98%, or at least 99% sequence identity to SEQ ID NO: 1, provided that the amino acid sequence comprises mutations of S128A, L153P, K324I, F333N, N162E, K229E, R280T, H222Q, K196S, wherein the positions correspond to SEQ ID NO: 1, and provided that the amino acid sequence comprises a cysteine (C) at a position in the polypeptide that corresponds to position 125 of SEQ ID NO: 1, a histidine (H) at a position in the polypeptide that corresponds to position 283 of SEQ ID NO: 1, an aspartic acid (D) at a position in the polypeptide that corresponds to position 305 of SEQ ID NO: 1, an aspartic acid (D) at a position in the polypeptide that corresponds to position 307 of SEQ ID NO: 1, and/or a lysine (K) at a position in the polypeptide that corresponds to position 115 of SEQ ID NO: 1. In some embodiments, the polypeptide having protease activity comprises an amino acid sequence having at least 50%, at least 60%, at least 70%, at least 80%, at least 81%, at least 82%, at least 83%, at least 84%, at least 85%, at least 86%, at least 87%, at least 88%, at least 89%, at least 90%, at least 91%, at least 92%, at least 93%, at least 94%, at least 95%, at least 96%, at least 97%, at least 98%, or at least 99% sequence identity to SEQ ID NO: 1, provided that the amino acid sequence comprises mutations of S128A, L153P, K324I, F333N, K318S, wherein the positions correspond to SEQ ID NO: 1, and provided that the amino acid sequence comprises a cysteine (C) at a position in the polypeptide that corresponds to position 125 of SEQ ID NO: 1, a histidine (H) at a position in the polypeptide that corresponds to position 283 of SEQ ID NO: 1, an aspartic acid (D) at a position in the polypeptide that corresponds to position 305 of SEQ ID NO: 1, an aspartic acid (D) at a position in the polypeptide that corresponds to position 307 of SEQ ID NO: 1, and/or a lysine (K) at a position in the polypeptide that corresponds to position 115 of SEQ ID NO: 1. In some embodiments, the polypeptide having protease activity comprises an amino acid sequence having at least 50%, at least 60%, at least 70%, at least 80%, at least 81%, at least 82%, at least 83%, at least 84%, at least 85%, at least 86%, at least 87%, at least 88%, at least 89%, at least 90%, at least 91%, at least 92%, at least 93%, at least 94%, at least 95%, at least 96%, at least 97%, at least 98%, or at least 99% sequence identity to SEQ ID NO: 1, provided that the amino acid sequence comprises mutations of S128A, L153P, K324I, F333N, N162E, K229E, K318S, wherein the positions correspond to SEQ ID NO: 1, and provided that the amino acid sequence comprises a cysteine (C) at a position in the polypeptide that corresponds to position 125 of SEQ ID NO: 1, a histidine (H) at a position in the polypeptide that corresponds to position 283 of SEQ ID NO: 1, an aspartic acid (D) at a position in the polypeptide that corresponds to position 305 of SEQ ID NO: 1, an aspartic acid (D) at a position in the polypeptide that corresponds to position 307 of SEQ ID NO: 1, and/or a lysine (K) at a position in the polypeptide that corresponds to position 115 of SEQ ID NO: 1. In some embodiments, the polypeptide having protease activity comprises an amino acid sequence having at least 50%, at least 60%, at least 70%, at least 80%, at least 81%, at least 82%, at least 83%, at least 84%, at least 85%, at least 86%, at least 87%, at least 88%, at least 89%, at least 90%, at least 91%, at least 92%, at least 93%, at least 94%, at least 95%, at least 96%, at least 97%, at least 98%, or at least 99% sequence identity to SEQ ID NO: 1, provided that the amino acid sequence comprises mutations of S128A, L153P, K324I, F333N, N162E, K229E, R280T, K318S, wherein the positions correspond to SEQ ID NO: 1, and provided that the amino acid sequence comprises a cysteine (C) at a position in the polypeptide that corresponds to position 125 of SEQ ID NO: 1, a histidine (H) at a position in the polypeptide that corresponds to position 283 of SEQ ID NO: 1, an aspartic acid (D) at a position in the polypeptide that corresponds to position 305 of SEQ ID NO: 1, an aspartic acid (D) at a position in the polypeptide that corresponds to position 307 of SEQ ID NO: 1, and/or a lysine (K) at a position in the polypeptide that corresponds to position 115 of SEQ ID NO: 1. In some embodiments, the polypeptide having protease activity comprises an amino acid sequence having at least 50%, at least 60%, at least 70%, at least 80%, at least 81%, at least 82%, at least 83%, at least 84%, at least 85%, at least 86%, at least 87%, at least 88%, at least 89%, at least 90%, at least 91%, at least 92%, at least 93%, at least 94%, at least 95%, at least 96%, at least 97%, at least 98%, or at least 99% sequence identity to SEQ ID NO: 1, provided that the amino acid sequence comprises mutations of S128A, L153P, K324I, F333N, R320W, wherein the positions correspond to SEQ ID NO: 1, and provided that the amino acid sequence comprises a cysteine (C) at a position in the polypeptide that corresponds to position 125 of SEQ ID NO: 1, a histidine (H) at a position in the polypeptide that corresponds to position 283 of SEQ ID NO: 1, an aspartic acid (D) at a position in the polypeptide that corresponds to position 305 of SEQ ID NO: 1, an aspartic acid (D) at a position in the polypeptide that corresponds to position 307 of SEQ ID NO: 1, and/or a lysine (K) at a position in the polypeptide that corresponds to position 115 of SEQ ID NO: 1. In some embodiments, the polypeptide having protease activity comprises an amino acid sequence having at least 50%, at least 60%, at least 70%, at least 80%, at least 81%, at least 82%, at least 83%, at least 84%, at least 85%, at least 86%, at least 87%, at least 88%, at least 89%, at least 90%, at least 91%, at least 92%, at least 93%, at least 94%, at least 95%, at least 96%, at least 97%, at least 98%, or at least 99% sequence identity to SEQ ID NO: 1, provided that the amino acid sequence comprises mutations of S128A, L153P, K324I, F333N, N162E, K229E, R320W, wherein the positions correspond to SEQ ID NO: 1, and provided that the amino acid sequence comprises a cysteine (C) at a position in the polypeptide that corresponds to position 125 of SEQ ID NO: 1, a histidine (H) at a position in the polypeptide that corresponds to position 283 of SEQ ID NO: 1, an aspartic acid (D) at a position in the polypeptide that corresponds to position 305 of SEQ ID NO: 1, an aspartic acid (D) at a position in the polypeptide that corresponds to position 307 of SEQ ID NO: 1, and/or a lysine (K) at a position in the polypeptide that corresponds to position 115 of SEQ ID NO: 1. In some embodiments, the polypeptide having protease activity comprises an amino acid sequence having at least 50%, at least 60%, at least 70%, at least 80%, at least 81%, at least 82%, at least 83%, at least 84%, at least 85%, at least 86%, at least 87%, at least 88%, at least 89%, at least 90%, at least 91%, at least 92%, at least 93%, at least 94%, at least 95%, at least 96%, at least 97%, at least 98%, or at least 99% sequence identity to SEQ ID NO: 1, provided that the amino acid sequence comprises mutations of S128A, L153P, K324I, F333N, N162E, K229E, R280T, R320W, wherein the positions correspond to SEQ ID NO: 1, and provided that the amino acid sequence comprises a cysteine (C) at a position in the polypeptide that corresponds to position 125 of SEQ ID NO: 1, a histidine (H) at a position in the polypeptide that corresponds to position 283 of SEQ ID NO: 1, an aspartic acid (D) at a position in the polypeptide that corresponds to position 305 of SEQ ID NO: 1, an aspartic acid (D) at a position in the polypeptide that corresponds to position 307 of SEQ ID NO: 1, and/or a lysine (K) at a position in the polypeptide that corresponds to position 115 of SEQ ID NO: 1. In some embodiments, the polypeptide having protease activity comprises an amino acid sequence having at least 50%, at least 60%, at least 70%, at least 80%, at least 81%, at least 82%, at least 83%, at least 84%, at least 85%, at least 86%, at least 87%, at least 88%, at least 89%, at least 90%, at least 91%, at least 92%, at least 93%, at least 94%, at least 95%, at least 96%, at least 97%, at least 98%, or at least 99% sequence identity to SEQ ID NO: 1, provided that the amino acid sequence comprises mutations of S128A, L153P, K324I, F333N, T122S, wherein the positions correspond to SEQ ID NO: 1, and provided that the amino acid sequence comprises a cysteine (C) at a position in the polypeptide that corresponds to position 125 of SEQ ID NO: 1, a histidine (H) at a position in the polypeptide that corresponds to position 283 of SEQ ID NO: 1, an aspartic acid (D) at a position in the polypeptide that corresponds to position 305 of SEQ ID NO: 1, an aspartic acid (D) at a position in the polypeptide that corresponds to position 307 of SEQ ID NO: 1, and/or a lysine (K) at a position in the polypeptide that corresponds to position 115 of SEQ ID NO: 1. In some embodiments, the polypeptide having protease activity comprises an amino acid sequence having at least 50%, at least 60%, at least 70%, at least 80%, at least 81%, at least 82%, at least 83%, at least 84%, at least 85%, at least 86%, at least 87%, at least 88%, at least 89%, at least 90%, at least 91%, at least 92%, at least 93%, at least 94%, at least 95%, at least 96%, at least 97%, at least 98%, or at least 99% sequence identity to SEQ ID NO: 1, provided that the amino acid sequence comprises mutations of S128A, L153P, K324I, F333N, N162E, K229E, T122S, wherein the positions correspond to SEQ ID NO: 1, and provided that the amino acid sequence comprises a cysteine (C) at a position in the polypeptide that corresponds to position 125 of SEQ ID NO: 1, a histidine (H) at a position in the polypeptide that corresponds to position 283 of SEQ ID NO: 1, an aspartic acid (D) at a position in the polypeptide that corresponds to position 305 of SEQ ID NO: 1, an aspartic acid (D) at a position in the polypeptide that corresponds to position 307 of SEQ ID NO: 1, and/or a lysine (K) at a position in the polypeptide that corresponds to position 115 of SEQ ID NO: 1. In some embodiments, the polypeptide having protease activity comprises an amino acid sequence having at least 50%, at least 60%, at least 70%, at least 80%, at least 81%, at least 82%, at least 83%, at least 84%, at least 85%, at least 86%, at least 87%, at least 88%, at least 89%, at least 90%, at least 91%, at least 92%, at least 93%, at least 94%, at least 95%, at least 96%, at least 97%, at least 98%, or at least 99% sequence identity to SEQ ID NO: 1, provided that the amino acid sequence comprises mutations of S128A, L153P, K324I, F333N, N162E, K229E, R280T, T122S, wherein the positions correspond to SEQ ID NO: 1, and provided that the amino acid sequence comprises a cysteine (C) at a position in the polypeptide that corresponds to position 125 of SEQ ID NO: 1, a histidine (H) at a position in the polypeptide that corresponds to position 283 of SEQ ID NO: 1, an aspartic acid (D) at a position in the polypeptide that corresponds to position 305 of SEQ ID NO: 1, an aspartic acid (D) at a position in the polypeptide that corresponds to position 307 of SEQ ID NO: 1, and/or a lysine (K) at a position in the polypeptide that corresponds to position 115 of SEQ ID NO: 1. In some embodiments, the polypeptide having protease activity comprises an amino acid sequence having at least 50%, at least 60%, at least 70%, at least 80%, at least 81%, at least 82%, at least 83%, at least 84%, at least 85%, at least 86%, at least 87%, at least 88%, at least 89%, at least 90%, at least 91%, at least 92%, at least 93%, at least 94%, at least 95%, at least 96%, at least 97%, at least 98%, or at least 99% sequence identity to SEQ ID NO: 1, provided that the amino acid sequence comprises mutations of S128A, L153P, K324I, F333N, D71Q, K68W, E75Y, D88H, wherein the positions correspond to SEQ ID NO: 1, and provided that the amino acid sequence comprises a cysteine (C) at a position in the polypeptide that corresponds to position 125 of SEQ ID NO: 1, a histidine (H) at a position in the polypeptide that corresponds to position 283 of SEQ ID NO: 1, an aspartic acid (D) at a position in the polypeptide that corresponds to position 305 of SEQ ID NO: 1, an aspartic acid (D) at a position in the polypeptide that corresponds to position 307 of SEQ ID NO: 1, and/or a lysine (K) at a position in the polypeptide that corresponds to position 115 of SEQ ID NO: 1. In some embodiments, the polypeptide having protease activity comprises an amino acid sequence having at least 50%, at least 60%, at least 70%, at least 80%, at least 81%, at least 82%, at least 83%, at least 84%, at least 85%, at least 86%, at least 87%, at least 88%, at least 89%, at least 90%, at least 91%, at least 92%, at least 93%, at least 94%, at least 95%, at least 96%, at least 97%, at least 98%, or at least 99% sequence identity to SEQ ID NO: 1, provided that the amino acid sequence comprises mutations of S128A, L153P, K324I, F333N, N162E, K229E, D71Q, K68W, E75Y, D88H, wherein the positions correspond to SEQ ID NO: 1, and provided that the amino acid sequence comprises a cysteine (C) at a position in the polypeptide that corresponds to position 125 of SEQ ID NO: 1, a histidine (H) at a position in the polypeptide that corresponds to position 283 of SEQ ID NO: 1, an aspartic acid (D) at a position in the polypeptide that corresponds to position 305 of SEQ ID NO: 1, an aspartic acid (D) at a position in the polypeptide that corresponds to position 307 of SEQ ID NO: 1, and/or a lysine (K) at a position in the polypeptide that corresponds to position 115 of SEQ ID NO: 1. In some embodiments, the polypeptide having protease activity comprises an amino acid sequence having at least 50%, at least 60%, at least 70%, at least 80%, at least 81%, at least 82%, at least 83%, at least 84%, at least 85%, at least 86%, at least 87%, at least 88%, at least 89%, at least 90%, at least 91%, at least 92%, at least 93%, at least 94%, at least 95%, at least 96%, at least 97%, at least 98%, or at least 99% sequence identity to SEQ ID NO: 1, provided that the amino acid sequence comprises mutations of S128A, L153P, K324I, F333N, N162E, K229E, R280T, D71Q, K68W, E75Y, D88H, wherein the positions correspond to SEQ ID NO: 1, and provided that the amino acid sequence comprises a cysteine (C) at a position in the polypeptide that corresponds to position 125 of SEQ ID NO: 1, a histidine (H) at a position in the polypeptide that corresponds to position 283 of SEQ ID NO: 1, an aspartic acid (D) at a position in the polypeptide that corresponds to position 305 of SEQ ID NO: 1, an aspartic acid (D) at a position in the polypeptide that corresponds to position 307 of SEQ ID NO: 1, and/or a lysine (K) at a position in the polypeptide that corresponds to position 115 of SEQ ID NO: 1. In some embodiments, the polypeptide having protease activity comprises an amino acid sequence having at least 50%, at least 60%, at least 70%, at least 80%, at least 81%, at least 82%, at least 83%, at least 84%, at least 85%, at least 86%, at least 87%, at least 88%, at least 89%, at least 90%, at least 91%, at least 92%, at least 93%, at least 94%, at least 95%, at least 96%, at least 97%, at least 98%, or at least 99% sequence identity to SEQ ID NO: 1, provided that the amino acid sequence comprises mutations of S128A, L153P, K324I, F333N, N162E, K229E, R280T, K196D, D71Q, K68W, E75Y, D88H, wherein the positions correspond to SEQ ID NO: 1, and provided that the amino acid sequence comprises a cysteine (C) at a position in the polypeptide that corresponds to position 125 of SEQ ID NO: 1, a histidine (H) at a position in the polypeptide that corresponds to position 283 of SEQ ID NO: 1, an aspartic acid (D) at a position in the polypeptide that corresponds to position 305 of SEQ ID NO: 1, an aspartic acid (D) at a position in the polypeptide that corresponds to position 307 of SEQ ID NO: 1, and/or a lysine (K) at a position in the polypeptide that corresponds to position 115 of SEQ ID NO: 1. In some embodiments, the polypeptide having protease activity comprises an amino acid sequence having at least 50%, at least 60%, at least 70%, at least 80%, at least 81%, at least 82%, at least 83%, at least 84%, at least 85%, at least 86%, at least 87%, at least 88%, at least 89%, at least 90%, at least 91%, at least 92%, at least 93%, at least 94%, at least 95%, at least 96%, at least 97%, at least 98%, or at least 99% sequence identity to SEQ ID NO: 1, provided that the amino acid sequence comprises mutations of S128A, L153P, K324I, F333N, K318S, R320W, T122S, D71Q, K68W, E75Y, D88H, wherein the positions correspond to SEQ ID NO: 1, and provided that the amino acid sequence comprises a cysteine (C) at a position in the polypeptide that corresponds to position 125 of SEQ ID NO: 1, a histidine (H) at a position in the polypeptide that corresponds to position 283 of SEQ ID NO: 1, an aspartic acid (D) at a position in the polypeptide that corresponds to position 305 of SEQ ID NO: 1, an aspartic acid (D) at a position in the polypeptide that corresponds to position 307 of SEQ ID NO: 1, and/or a lysine (K) at a position in the polypeptide that corresponds to position 115 of SEQ ID NO: 1. In some embodiments, the polypeptide having protease activity comprises an amino acid sequence having at least 50%, at least 60%, at least 70%, at least 80%, at least 81%, at least 82%, at least 83%, at least 84%, at least 85%, at least 86%, at least 87%, at least 88%, at least 89%, at least 90%, at least 91%, at least 92%, at least 93%, at least 94%, at least 95%, at least 96%, at least 97%, at least 98%, or at least 99% sequence identity to SEQ ID NO: 1, provided that the amino acid sequence comprises mutations of S128A, L153P, K324I, F333N, N162E, K229E, K318S, R320W, T122S, D71Q, K68W, E75Y, D88H, wherein the positions correspond to SEQ ID NO: 1, and provided that the amino acid sequence comprises a cysteine (C) at a position in the polypeptide that corresponds to position 125 of SEQ ID NO: 1, a histidine (H) at a position in the polypeptide that corresponds to position 283 of SEQ ID NO: 1, an aspartic acid (D) at a position in the polypeptide that corresponds to position 305 of SEQ ID NO: 1, an aspartic acid (D) at a position in the polypeptide that corresponds to position 307 of SEQ ID NO: 1, and/or a lysine (K) at a position in the polypeptide that corresponds to position 115 of SEQ ID NO: 1. In some embodiments, the polypeptide having protease activity comprises an amino acid sequence having at least 50%, at least 60%, at least 70%, at least 80%, at least 81%, at least 82%, at least 83%, at least 84%, at least 85%, at least 86%, at least 87%, at least 88%, at least 89%, at least 90%, at least 91%, at least 92%, at least 93%, at least 94%, at least 95%, at least 96%, at least 97%, at least 98%, or at least 99% sequence identity to SEQ ID NO: 1, provided that the amino acid sequence comprises mutations of S128A, L153P, K324I, F333N, N162E, K229E, R280T, K318S, R320W, T122S, D71Q, K68W, E75Y, D88H, wherein the positions correspond to SEQ ID NO: 1, and provided that the amino acid sequence comprises a cysteine (C) at a position in the polypeptide that corresponds to position 125 of SEQ ID NO: 1, a histidine (H) at a position in the polypeptide that corresponds to position 283 of SEQ ID NO: 1, an aspartic acid (D) at a position in the polypeptide that corresponds to position 305 of SEQ ID NO: 1, an aspartic acid (D) at a position in the polypeptide that corresponds to position 307 of SEQ ID NO: 1, and/or a lysine (K) at a position in the polypeptide that corresponds to position 115 of SEQ ID NO: 1. In some embodiments, the polypeptide having protease activity comprises an amino acid sequence having at least 50%, at least 60%, at least 70%, at least 80%, at least 81%, at least 82%, at least 83%, at least 84%, at least 85%, at least 86%, at least 87%, at least 88%, at least 89%, at least 90%, at least 91%, at least 92%, at least 93%, at least 94%, at least 95%, at least 96%, at least 97%, at least 98%, or at least 99% sequence identity to SEQ ID NO: 1, provided that the amino acid sequence comprises mutations of S128A, L153P, K324I, F333N, N162E, K229E, R280T, K196D, K318S, R320W, T122S, D71Q, K68W, E75Y, D88H, wherein the positions correspond to SEQ ID NO: 1, and provided that the amino acid sequence comprises a cysteine (C) at a position in the polypeptide that corresponds to position 125 of SEQ ID NO: 1, a histidine (H) at a position in the polypeptide that corresponds to position 283 of SEQ ID NO: 1, an aspartic acid (D) at a position in the polypeptide that corresponds to position 305 of SEQ ID NO: 1, an aspartic acid (D) at a position in the polypeptide that corresponds to position 307 of SEQ ID NO: 1, and/or a lysine (K) at a position in the polypeptide that corresponds to position 115 of SEQ ID NO: 1. In some embodiments, the polypeptide having protease activity comprises an amino acid sequence having at least 50%, at least 60%, at least 70%, at least 80%, at least 81%, at least 82%, at least 83%, at least 84%, at least 85%, at least 86%, at least 87%, at least 88%, at least 89%, at least 90%, at least 91%, at least 92%, at least 93%, at least 94%, at least 95%, at least 96%, at least 97%, at least 98%, or at least 99% sequence identity to SEQ ID NO: 1, provided that the amino acid sequence comprises mutations of S128A, L153P, K324I, F333N, H275Y, wherein the positions correspond to SEQ ID NO: 1, and provided that the amino acid sequence comprises a cysteine (C) at a position in the polypeptide that corresponds to position 125 of SEQ ID NO: 1, a histidine (H) at a position in the polypeptide that corresponds to position 283 of SEQ ID NO: 1, an aspartic acid (D) at a position in the polypeptide that corresponds to position 305 of SEQ ID NO: 1, an aspartic acid (D) at a position in the polypeptide that corresponds to position 307 of SEQ ID NO: 1, and/or a lysine (K) at a position in the polypeptide that corresponds to position 115 of SEQ ID NO: 1. In some embodiments, the polypeptide having protease activity comprises an amino acid sequence having at least 50%, at least 60%, at least 70%, at least 80%, at least 81%, at least 82%, at least 83%, at least 84%, at least 85%, at least 86%, at least 87%, at least 88%, at least 89%, at least 90%, at least 91%, at least 92%, at least 93%, at least 94%, at least 95%, at least 96%, at least 97%, at least 98%, or at least 99% sequence identity to SEQ ID NO: 1, provided that the amino acid sequence comprises mutations of S128A, L153P, K324I, F333N, N162E, K229E, H275Y, wherein the positions correspond to SEQ ID NO: 1, and provided that the amino acid sequence comprises a cysteine (C) at a position in the polypeptide that corresponds to position 125 of SEQ ID NO: 1, a histidine (H) at a position in the polypeptide that corresponds to position 283 of SEQ ID NO: 1, an aspartic acid (D) at a position in the polypeptide that corresponds to position 305 of SEQ ID NO: 1, an aspartic acid (D) at a position in the polypeptide that corresponds to position 307 of SEQ ID NO: 1, and/or a lysine (K) at a position in the polypeptide that corresponds to position 115 of SEQ ID NO: 1. In some embodiments, the polypeptide having protease activity comprises an amino acid sequence having at least 50%, at least 60%, at least 70%, at least 80%, at least 81%, at least 82%, at least 83%, at least 84%, at least 85%, at least 86%, at least 87%, at least 88%, at least 89%, at least 90%, at least 91%, at least 92%, at least 93%, at least 94%, at least 95%, at least 96%, at least 97%, at least 98%, or at least 99% sequence identity to SEQ ID NO: 1, provided that the amino acid sequence comprises mutations of S128A, L153P, K324I, F333N, N162E, K229E, R280T, H275Y, wherein the positions correspond to SEQ ID NO: 1, and provided that the amino acid sequence comprises a cysteine (C) at a position in the polypeptide that corresponds to position 125 of SEQ ID NO: 1, a histidine (H) at a position in the polypeptide that corresponds to position 283 of SEQ ID NO: 1, an aspartic acid (D) at a position in the polypeptide that corresponds to position 305 of SEQ ID NO: 1, an aspartic acid (D) at a position in the polypeptide that corresponds to position 307 of SEQ ID NO: 1, and/or a lysine (K) at a position in the polypeptide that corresponds to position 115 of SEQ ID NO: 1. In some embodiments, the polypeptide having protease activity comprises an amino acid sequence having at least 50%, at least 60%, at least 70%, at least 80%, at least 81%, at least 82%, at least 83%, at least 84%, at least 85%, at least 86%, at least 87%, at least 88%, at least 89%, at least 90%, at least 91%, at least 92%, at least 93%, at least 94%, at least 95%, at least 96%, at least 97%, at least 98%, or at least 99% sequence identity to SEQ ID NO: 1, provided that the amino acid sequence comprises mutations of S128A, L153P, K324I, F333N, N162E, K229E, R280T, H222Q, K196S, K318S, wherein the positions correspond to SEQ ID NO: 1, and provided that the amino acid sequence comprises a cysteine (C) at a position in the polypeptide that corresponds to position 125 of SEQ ID NO: 1, a histidine (H) at a position in the polypeptide that corresponds to position 283 of SEQ ID NO: 1, an aspartic acid (D) at a position in the polypeptide that corresponds to position 305 of SEQ ID NO: 1, an aspartic acid (D) at a position in the polypeptide that corresponds to position 307 of SEQ ID NO: 1, and/or a lysine (K) at a position in the polypeptide that corresponds to position 115 of SEQ ID NO: 1. In some embodiments, the polypeptide having protease activity comprises an amino acid sequence having at least 50%, at least 60%, at least 70%, at least 80%, at least 81%, at least 82%, at least 83%, at least 84%, at least 85%, at least 86%, at least 87%, at least 88%, at least 89%, at least 90%, at least 91%, at least 92%, at least 93%, at least 94%, at least 95%, at least 96%, at least 97%, at least 98%, or at least 99% sequence identity to SEQ ID NO: 1, provided that the amino acid sequence comprises mutations of S128A, L153P, K324I, F333N, N162E, K229E, R280T, H222Q, K196S, R320W, wherein the positions correspond to SEQ ID NO: 1, and provided that the amino acid sequence comprises a cysteine (C) at a position in the polypeptide that corresponds to position 125 of SEQ ID NO: 1, a histidine (H) at a position in the polypeptide that corresponds to position 283 of SEQ ID NO: 1, an aspartic acid (D) at a position in the polypeptide that corresponds to position 305 of SEQ ID NO: 1, an aspartic acid (D) at a position in the polypeptide that corresponds to position 307 of SEQ ID NO: 1, and/or a lysine (K) at a position in the polypeptide that corresponds to position 115 of SEQ ID NO: 1. In some embodiments, the polypeptide having protease activity comprises an amino acid sequence having at least 50%, at least 60%, at least 70%, at least 80%, at least 81%, at least 82%, at least 83%, at least 84%, at least 85%, at least 86%, at least 87%, at least 88%, at least 89%, at least 90%, at least 91%, at least 92%, at least 93%, at least 94%, at least 95%, at least 96%, at least 97%, at least 98%, or at least 99% sequence identity to SEQ ID NO: 1, provided that the amino acid sequence comprises mutations of S128A, L153P, K324I, F333N, N162E, K229E, R280T, H222Q, K196S, T122S, wherein the positions correspond to SEQ ID NO: 1, and provided that the amino acid sequence comprises a cysteine (C) at a position in the polypeptide that corresponds to position 125 of SEQ ID NO: 1, a histidine (H) at a position in the polypeptide that corresponds to position 283 of SEQ ID NO: 1, an aspartic acid (D) at a position in the polypeptide that corresponds to position 305 of SEQ ID NO: 1, an aspartic acid (D) at a position in the polypeptide that corresponds to position 307 of SEQ ID NO: 1, and/or a lysine (K) at a position in the polypeptide that corresponds to position 115 of SEQ ID NO: 1. In some embodiments, the polypeptide having protease activity comprises an amino acid sequence having at least 50%, at least 60%, at least 70%, at least 80%, at least 81%, at least 82%, at least 83%, at least 84%, at least 85%, at least 86%, at least 87%, at least 88%, at least 89%, at least 90%, at least 91%, at least 92%, at least 93%, at least 94%, at least 95%, at least 96%, at least 97%, at least 98%, or at least 99% sequence identity to SEQ ID NO: 1, provided that the amino acid sequence comprises mutations of S128A, L153P, K324I, F333N, N162E, K229E, R280T, H222Q, K196S, H275Y, wherein the positions correspond to SEQ ID NO: 1, and provided that the amino acid sequence comprises a cysteine (C) at a position in the polypeptide that corresponds to position 125 of SEQ ID NO: 1, a histidine (H) at a position in the polypeptide that corresponds to position 283 of SEQ ID NO: 1, an aspartic acid (D) at a position in the polypeptide that corresponds to position 305 of SEQ ID NO: 1, an aspartic acid (D) at a position in the polypeptide that corresponds to position 307 of SEQ ID NO: 1, and/or a lysine (K) at a position in the polypeptide that corresponds to position 115 of SEQ ID NO: 1. In some embodiments, the polypeptide having protease activity comprises an amino acid sequence having at least 50%, at least 60%, at least 70%, at least 80%, at least 81%, at least 82%, at least 83%, at least 84%, at least 85%, at least 86%, at least 87%, at least 88%, at least 89%, at least 90%, at least 91%, at least 92%, at least 93%, at least 94%, at least 95%, at least 96%, at least 97%, at least 98%, or at least 99% sequence identity to SEQ ID NO: 1, provided that the amino acid sequence comprises mutations of S128A, L153P, K324I, F333N, N162E, K229E, R280T, H222Q, K196S, D71Q, K68W, E75Y, D88H, wherein the positions correspond to SEQ ID NO: 1, and provided that the amino acid sequence comprises a cysteine (C) at a position in the polypeptide that corresponds to position 125 of SEQ ID NO: 1, a histidine (H) at a position in the polypeptide that corresponds to position 283 of SEQ ID NO: 1, an aspartic acid (D) at a position in the polypeptide that corresponds to position 305 of SEQ ID NO: 1, an aspartic acid (D) at a position in the polypeptide that corresponds to position 307 of SEQ ID NO: 1, and/or a lysine (K) at a position in the polypeptide that corresponds to position 115 of SEQ ID NO: 1. In some embodiments, the polypeptide having protease activity comprises an amino acid sequence having at least 50%, at least 60%, at least 70%, at least 80%, at least 81%, at least 82%, at least 83%, at least 84%, at least 85%, at least 86%, at least 87%, at least 88%, at least 89%, at least 90%, at least 91%, at least 92%, at least 93%, at least 94%, at least 95%, at least 96%, at least 97%, at least 98%, or at least 99% sequence identity to SEQ ID NO: 1, provided that the amino acid sequence comprises mutations of S128A, L153P, K324I, F333N, N162E, K229E, R280T, H222Q, K196S, K318S, R320W, T122S, D71Q, K68W, E75Y, D88H, wherein the positions correspond to SEQ ID NO: 1, and provided that the amino acid sequence comprises a cysteine (C) at a position in the polypeptide that corresponds to position 125 of SEQ ID NO: 1, a histidine (H) at a position in the polypeptide that corresponds to position 283 of SEQ ID NO: 1, an aspartic acid (D) at a position in the polypeptide that corresponds to position 305 of SEQ ID NO: 1, an aspartic acid (D) at a position in the polypeptide that corresponds to position 307 of SEQ ID NO: 1, and/or a lysine (K) at a position in the polypeptide that corresponds to position 115 of SEQ ID NO: 1. In some embodiments, the polypeptide having protease activity comprises an amino acid sequence having at least 50%, at least 60%, at least 70%, at least 80%, at least 81%, at least 82%, at least 83%, at least 84%, at least 85%, at least 86%, at least 87%, at least 88%, at least 89%, at least 90%, at least 91%, at least 92%, at least 93%, at least 94%, at least 95%, at least 96%, at least 97%, at least 98%, or at least 99% sequence identity to SEQ ID NO: 1, provided that the amino acid sequence comprises mutations of S128A, L153P, K324I, F333N, D71Q, wherein the positions correspond to SEQ ID NO: 1, and provided that the amino acid sequence comprises a cysteine (C) at a position in the polypeptide that corresponds to position 125 of SEQ ID NO: 1, a histidine (H) at a position in the polypeptide that corresponds to position 283 of SEQ ID NO: 1, an aspartic acid (D) at a position in the polypeptide that corresponds to position 305 of SEQ ID NO: 1, an aspartic acid (D) at a position in the polypeptide that corresponds to position 307 of SEQ ID NO: 1, and/or a lysine (K) at a position in the polypeptide that corresponds to position 115 of SEQ ID NO: 1. In some embodiments, the polypeptide having protease activity comprises an amino acid sequence having at least 50%, at least 60%, at least 70%, at least 80%, at least 81%, at least 82%, at least 83%, at least 84%, at least 85%, at least 86%, at least 87%, at least 88%, at least 89%, at least 90%, at least 91%, at least 92%, at least 93%, at least 94%, at least 95%, at least 96%, at least 97%, at least 98%, or at least 99% sequence identity to SEQ ID NO: 1, provided that the amino acid sequence comprises mutations of S128A, L153P, K324I, F333N, D112Q, wherein the positions correspond to SEQ ID NO: 1, and provided that the amino acid sequence comprises a cysteine (C) at a position in the polypeptide that corresponds to position 125 of SEQ ID NO: 1, a histidine (H) at a position in the polypeptide that corresponds to position 283 of SEQ ID NO: 1, an aspartic acid (D) at a position in the polypeptide that corresponds to position 305 of SEQ ID NO: 1, an aspartic acid (D) at a position in the polypeptide that corresponds to position 307 of SEQ ID NO: 1, and/or a lysine (K) at a position in the polypeptide that corresponds to position 115 of SEQ ID NO: 1. In some embodiments, the polypeptide having protease activity comprises an amino acid sequence having at least 50%, at least 60%, at least 70%, at least 80%, at least 81%, at least 82%, at least 83%, at least 84%, at least 85%, at least 86%, at least 87%, at least 88%, at least 89%, at least 90%, at least 91%, at least 92%, at least 93%, at least 94%, at least 95%, at least 96%, at least 97%, at least 98%, or at least 99% sequence identity to SEQ ID NO: 1, provided that the amino acid sequence comprises mutations of S128A, L153P, K324I, F333N, D327Y, wherein the positions correspond to SEQ ID NO: 1, and provided that the amino acid sequence comprises a cysteine ID NO: 1, and/or a lysine (K) at a position in the polypeptide that corresponds to position 115 of SEQ ID NO: 1. In some embodiments, the polypeptide having protease activity comprises an amino acid sequence having at least 50%, at least 60%, at least 70%, at least 80%, at least 81%, at least 82%, at least 83%, at least 84%, at least 85%, at least 86%, at least 87%, at least 88%, at least 89%, at least 90%, at least 91%, at least 92%, at least 93%, at least 94%, at least 95%, at least 96%, at least 97%, at least 98%, or at least 99% sequence identity to SEQ ID NO: 1, provided that the amino acid sequence comprises mutations of S128A, L153P, K324I, F333N, K68W, wherein the positions correspond to SEQ ID NO: 1, and provided that the amino acid sequence comprises a cysteine (C) at a position in the polypeptide that corresponds to position 125 of SEQ ID NO: 1, a histidine (H) at a position in the polypeptide that corresponds to position 283 of SEQ ID NO: 1, an aspartic acid (D) at a position in the polypeptide that corresponds to position 305 of SEQ ID NO: 1, an aspartic acid (D) at a position in the polypeptide that corresponds to position 307 of SEQ ID NO: 1, and/or a lysine (K) at a position in the polypeptide that corresponds to position 115 of SEQ ID NO: 1. In some embodiments, the polypeptide having protease activity comprises an amino acid sequence having at least 50%, at least 60%, at least 70%, at least 80%, at least 81%, at least 82%, at least 83%, at least 84%, at least 85%, at least 86%, at least 87%, at least 88%, at least 89%, at least 90%, at least 91%, at least 92%, at least 93%, at least 94%, at least 95%, at least 96%, at least 97%, at least 98%, or at least 99% sequence identity to SEQ ID NO: 1, provided that the amino acid sequence comprises mutations of S128A, L153P, K324I, F333N, E75Y, wherein the positions correspond to SEQ ID NO: 1, and provided that the amino acid sequence comprises a cysteine (C) at a position in the polypeptide that corresponds to position 125 of SEQ ID NO: 1, a histidine (H) at a position in the polypeptide that corresponds to position 283 of SEQ ID NO: 1, an aspartic acid (D) at a position in the polypeptide that corresponds to position 305 of SEQ ID NO: 1, an aspartic acid (D) at a position in the polypeptide that corresponds to position 307 of SEQ ID NO: 1, and/or a lysine (K) at a position in the polypeptide that corresponds to position 115 of SEQ ID NO: 1. In some embodiments, the polypeptide having protease activity comprises an amino acid sequence having at least 50%, at least 60%, at least 70%, at least 80%, at least 81%, at least 82%, at least 83%, at least 84%, at least 85%, at least 86%, at least 87%, at least 88%, at least 89%, at least 90%, at least 91%, at least 92%, at least 93%, at least 94%, at least 95%, at least 96%, at least 97%, at least 98%, or at least 99% sequence identity to SEQ ID NO: 1, provided that the amino acid sequence comprises mutations of S128A, L153P, K324I, F333N, D88H, wherein the positions correspond to SEQ ID NO: 1, and provided that the amino acid sequence comprises a cysteine (C) at a position in the polypeptide that corresponds to position 125 of SEQ ID NO: 1, a histidine (H) at a position in the polypeptide that corresponds to position 283 of SEQ ID NO: 1, an aspartic acid (D) at a position in the polypeptide that corresponds to position 305 of SEQ ID NO: 1, an aspartic acid (D) at a position in the polypeptide that corresponds to position 307 of SEQ ID NO: 1, and/or a lysine (K) at a position in the polypeptide that corresponds to position 115 of SEQ ID NO: 1. In some embodiments, the polypeptide having protease activity comprises an amino acid sequence having at least 50%, at least 60%, at least 70%, at least 80%, at least 81%, at least 82%, at least 83%, at least 84%, at least 85%, at least 86%, at least 87%, at least 88%, at least 89%, at least 90%, at least 91%, at least 92%, at least 93%, at least 94%, at least 95%, at least 96%, at least 97%, at least 98%, or at least 99% sequence identity to SEQ ID NO: 1, provided that the amino acid sequence comprises mutations of S128A, L153P, K324I, F333N, N219Q, wherein the positions correspond to SEQ ID NO: 1, and provided that the amino acid sequence comprises a cysteine (C) at a position in the polypeptide that corresponds to position 125 of SEQ ID NO: 1, a histidine (H) at a position in the polypeptide that corresponds to position 283 of SEQ ID NO: 1, an aspartic acid (D) at a position in the polypeptide that corresponds to position 305 of SEQ ID NO: 1, an aspartic acid (D) at a position in the polypeptide that corresponds to position 307 of SEQ ID NO: 1, and/or a lysine (K) at a position in the polypeptide that corresponds to position 115 of SEQ ID NO: 1. In some embodiments, the polypeptide having protease activity comprises an amino acid sequence having at least 50%, at least 60%, at least 70%, at least 80%, at least 81%, at least 82%, at least 83%, at least 84%, at least 85%, at least 86%, at least 87%, at least 88%, at least 89%, at least 90%, at least 91%, at least 92%, at least 93%, at least 94%, at least 95%, at least 96%, at least 97%, at least 98%, or at least 99% sequence identity to SEQ ID NO: 1, provided that the amino acid sequence comprises mutations of S128A, L153P, K324I, F333N, S221N, wherein the positions correspond to SEQ ID NO: 1, and provided that the amino acid sequence comprises a cysteine (C) at a position in the polypeptide that corresponds to position 125 of SEQ ID NO: 1, a histidine (H) at a position in the polypeptide that corresponds to position 283 of SEQ ID NO: 1, an aspartic acid (D) at a position in the polypeptide that corresponds to position 305 of SEQ ID NO: 1, an aspartic acid (D) at a position in the polypeptide that corresponds to position 307 of SEQ ID NO: 1, and/or a lysine (K) at a position in the polypeptide that corresponds to position 115 of SEQ ID NO: 1. In some embodiments, the polypeptide having protease activity comprises an amino acid sequence having at least 50%, at least 60%, at least 70%, at least 80%, at least 81%, at least 82%, at least 83%, at least 84%, at least 85%, at least 86%, at least 87%, at least 88%, at least 89%, at least 90%, at least 91%, at least 92%, at least 93%, at least 94%, at least 95%, at least 96%, at least 97%, at least 98%, or at least 99% sequence identity to SEQ ID NO: 1, provided that the amino acid sequence comprises mutations of S128A, L153P, K324I, F333N, N219G, wherein the positions correspond to SEQ ID NO: 1, and provided that the amino acid sequence comprises a cysteine (C) at a position in the polypeptide that corresponds to position 125 of SEQ ID NO: 1, a histidine (H) at a position in the polypeptide that corresponds to position 283 of SEQ ID NO: 1, an aspartic acid (D) at a position in the polypeptide that corresponds to position 305 of SEQ ID NO: 1, an aspartic acid (D) at a position in the polypeptide that corresponds to position 307 of SEQ ID NO: 1, and/or a lysine (K) at a position in the polypeptide that corresponds to position 115 of SEQ ID NO: 1. In some embodiments, the polypeptide having protease activity comprises an amino acid sequence having at least 50%, at least 60%, at least 70%, at least 80%, at least 81%, at least 82%, at least 83%, at least 84%, at least 85%, at least 86%, at least 87%, at least 88%, at least 89%, at least 90%, at least 91%, at least 92%, at least 93%, at least 94%, at least 95%, at least 96%, at least 97%, at least 98%, or at least 99% sequence identity to SEQ ID NO: 1, provided that the amino acid sequence comprises mutations of S128A, L153P, K324I, F333N, N219T, wherein the positions correspond to SEQ ID NO: 1, and provided that the amino acid sequence comprises a cysteine (C) at a position in the polypeptide that corresponds to position 125 of SEQ ID NO: 1, a histidine (H) at a position in the polypeptide that corresponds to position 283 of SEQ ID NO: 1, an aspartic acid (D) at a position in the polypeptide that corresponds to position 305 of SEQ ID NO: 1, an aspartic acid (D) at a position in the polypeptide that corresponds to position 307 of SEQ ID NO: 1, and/or a lysine (K) at a position in the polypeptide that corresponds to position 115 of SEQ ID NO: 1. In some embodiments, the polypeptide having protease activity comprises an amino acid sequence having at least 50%, at least 60%, at least 70%, at least 80%, at least 81%, at least 82%, at least 83%, at least 84%, at least 85%, at least 86%, at least 87%, at least 88%, at least 89%, at least 90%, at least 91%, at least 92%, at least 93%, at least 94%, at least 95%, at least 96%, at least 97%, at least 98%, or at least 99% sequence identity to SEQ ID NO: 1, provided that the amino acid sequence comprises mutations of S128A, L153P, K324I, F333N, K318S, N316S, wherein the positions correspond to SEQ ID NO: 1, and provided that the amino acid sequence comprises a cysteine (C) at a position in the polypeptide that corresponds to position 125 of SEQ ID NO: 1, a histidine (H) at a position in the polypeptide that corresponds to position 283 of SEQ ID NO: 1, an aspartic acid (D) at a position in the polypeptide that corresponds to position 305 of SEQ ID NO: 1, an aspartic acid (D) at a position in the polypeptide that corresponds to position 307 of SEQ ID NO: 1, and/or a lysine (K) at a position in the polypeptide that corresponds to position 115 of SEQ ID NO: 1. In some embodiments, the polypeptide having protease activity comprises an amino acid sequence having at least 50%, at least 60%, at least 70%, at least 80%, at least 81%, at least 82%, at least 83%, at least 84%, at least 85%, at least 86%, at least 87%, at least 88%, at least 89%, at least 90%, at least 91%, at least 92%, at least 93%, at least 94%, at least 95%, at least 96%, at least 97%, at least 98%, or at least 99% sequence identity to SEQ ID NO: 1, provided that the amino acid sequence comprises mutations of S128A, L153P, K324I, F333N, K318S, N316Q, wherein the positions correspond to SEQ ID NO: 1, and provided that the amino acid sequence comprises a cysteine (C) at a position in the polypeptide that corresponds to position 125 of SEQ ID NO: 1, a histidine (H) at a position in the polypeptide that corresponds to position 283 of SEQ ID NO: 1, an aspartic acid (D) at a position in the polypeptide that corresponds to position 305 of SEQ ID NO: 1, an aspartic acid (D) at a position in the polypeptide that corresponds to position 307 of SEQ ID NO: 1, and/or a lysine (K) at a position in the polypeptide that corresponds to position 115 of SEQ ID NO: 1. In some embodiments, the polypeptide having protease activity comprises an amino acid sequence having at least 50%, at least 60%, at least 70%, at least 80%, at least 81%, at least 82%, at least 83%, at least 84%, at least 85%, at least 86%, at least 87%, at least 88%, at least 89%, at least 90%, at least 91%, at least 92%, at least 93%, at least 94%, at least 95%, at least 96%, at least 97%, at least 98%, or at least 99% sequence identity to SEQ ID NO: 1, provided that the amino acid sequence comprises mutations of S128A, L153P, K324I, F333N, S221E, wherein the positions correspond to SEQ ID NO: 1, and provided that the amino acid sequence comprises a cysteine (C) at a position in the polypeptide that corresponds to position 125 of SEQ ID NO: 1, a histidine (H) at a position in the polypeptide that corresponds to position 283 of SEQ ID NO: 1, an aspartic acid (D) at a position in the polypeptide that corresponds to position 305 of SEQ ID NO: 1, an aspartic acid (D) at a position in the polypeptide that corresponds to position 307 of SEQ ID NO: 1, and/or a lysine (K) at a position in the polypeptide that corresponds to position 115 of SEQ ID NO: 1. In some embodiments, the polypeptide having protease activity comprises an amino acid sequence having at least 50%, at least 60%, at least 70%, at least 80%, at least 81%, at least 82%, at least 83%, at least 84%, at least 85%, at least 86%, at least 87%, at least 88%, at least 89%, at least 90%, at least 91%, at least 92%, at least 93%, at least 94%, at least 95%, at least 96%, at least 97%, at least 98%, or at least 99% sequence identity to SEQ ID NO: 1, provided that the amino acid sequence comprises mutations of S128A, L153P, K324I, F333N, N219K, wherein the positions correspond to SEQ ID NO: 1, and provided that the amino acid sequence comprises a cysteine (C) at a position in the polypeptide that corresponds to position 125 of SEQ ID NO: 1, a histidine (H) at a position in the polypeptide that corresponds to position 283 of SEQ ID NO: 1, an aspartic acid (D) at a position in the polypeptide that corresponds to position 305 of SEQ ID NO: 1, an aspartic acid (D) at a position in the polypeptide that corresponds to position 307 of SEQ ID NO: 1, and/or a lysine (K) at a position in the polypeptide that corresponds to position 115 of SEQ ID NO: 1. In some embodiments, the polypeptide having protease activity comprises an amino acid sequence having at least 50%, at least 60%, at least 70%, at least 80%, at least 81%, at least 82%, at least 83%, at least 84%, at least 85%, at least 86%, at least 87%, at least 88%, at least 89%, at least 90%, at least 91%, at least 92%, at least 93%, at least 94%, at least 95%, at least 96%, at least 97%, at least 98%, or at least 99% sequence identity to SEQ ID NO: 1, provided that the amino acid sequence comprises mutations of S128A, L153P, K324I, F333N, Y252R, wherein the positions correspond to SEQ ID NO: 1, and provided that the amino acid sequence comprises a cysteine (C) at a position in the polypeptide that corresponds to position 125 of SEQ ID NO: 1, a histidine (H) at a position in the polypeptide that corresponds to position 283 of SEQ ID NO: 1, an aspartic acid (D) at a position in the polypeptide that corresponds to position 305 of SEQ ID NO: 1, an aspartic acid (D) at a position in the polypeptide that corresponds to position 307 of SEQ ID NO: 1, and/or a lysine (K) at a position in the polypeptide that corresponds to position 115 of SEQ ID NO: 1. In some embodiments, the polypeptide having protease activity comprises an amino acid sequence having at least 50%, at least 60%, at least 70%, at least 80%, at least 81%, at least 82%, at least 83%, at least 84%, at least 85%, at least 86%, at least 87%, at least 88%, at least 89%, at least 90%, at least 91%, at least 92%, at least 93%, at least 94%, at least 95%, at least 96%, at least 97%, at least 98%, or at least 99% sequence identity to SEQ ID NO: 1, provided that the amino acid sequence comprises mutations of S128A, L153P, K324I, F333N, R250GYG, S251I, wherein the positions correspond to SEQ ID NO: 1, and provided that the amino acid sequence comprises a cysteine (C) at a position in the polypeptide that corresponds to position 125 of SEQ ID NO: 1, a histidine (H) at a position in the polypeptide that corresponds to position 283 of SEQ ID NO: 1, an aspartic acid (D) at a position in the polypeptide that corresponds to position 305 of SEQ ID NO: 1, an aspartic acid (D) at a position in the polypeptide that corresponds to position 307 of SEQ ID NO: 1, and/or a lysine (K) at a position in the polypeptide that corresponds to position 115 of SEQ ID NO: 1. In some embodiments, the polypeptide having protease activity comprises an amino acid sequence having at least 50%, at least 60%, at least 70%, at least 80%, at least 81%, at least 82%, at least 83%, at least 84%, at least 85%, at least 86%, at least 87%, at least 88%, at least 89%, at least 90%, at least 91%, at least 92%, at least 93%, at least 94%, at least 95%, at least 96%, at least 97%, at least 98%, or at least 99% sequence identity to SEQ ID NO: 1, provided that the amino acid sequence comprises mutations of S128A, L153P, K324I, F333N, R250GGYGG (SEQ ID NO: 918), S251I, wherein the positions correspond to SEQ ID NO: 1, and provided that the amino acid sequence comprises a cysteine (C) at a position in the polypeptide that corresponds to position 125 of SEQ ID NO: 1, a histidine (H) at a position in the polypeptide that corresponds to position 283 of SEQ ID NO: 1, an aspartic acid (D) at a position in the polypeptide that corresponds to position 305 of SEQ ID NO: 1, an aspartic acid (D) at a position in the polypeptide that corresponds to position 307 of SEQ ID NO: 1, and/or a lysine (K) at a position in the polypeptide that corresponds to position 115 of SEQ ID NO: 1. In some embodiments, the polypeptide having protease activity comprises an amino acid sequence having at least 50%, at least 60%, at least 70%, at least 80%, at least 81%, at least 82%, at least 83%, at least 84%, at least 85%, at least 86%, at least 87%, at least 88%, at least 89%, at least 90%, at least 91%, at least 92%, at least 93%, at least 94%, at least 95%, at least 96%, at least 97%, at least 98%, or at least 99% sequence identity to SEQ ID NO: 1, provided that the amino acid sequence comprises mutations of S128A, L153P, K324I, F333N, P205L, E206T, wherein the positions correspond to SEQ ID NO: 1, and provided that the amino acid sequence comprises a cysteine (C) at a position in the polypeptide that corresponds to position 125 of SEQ ID NO: 1, a histidine (H) at a position in the polypeptide that corresponds to position 283 of SEQ ID NO: 1, an aspartic acid (D) at a position in the polypeptide that corresponds to position 305 of SEQ ID NO: 1, an aspartic acid (D) at a position in the polypeptide that corresponds to position 307 of SEQ ID NO: 1, and/or a lysine (K) at a position in the polypeptide that corresponds to position 115 of SEQ ID NO: 1. In some embodiments, the polypeptide having protease activity comprises an amino acid sequence having at least 50%, at least 60%, at least 70%, at least 80%, at least 81%, at least 82%, at least 83%, at least 84%, at least 85%, at least 86%, at least 87%, at least 88%, at least 89%, at least 90%, at least 91%, at least 92%, at least 93%, at least 94%, at least 95%, at least 96%, at least 97%, at least 98%, or at least 99% sequence identity to SEQ ID NO: 1, provided that the amino acid sequence comprises mutations of S128A, L153P, K324I, F333N, P205F, E206T, wherein the positions correspond to SEQ ID NO: 1, and provided that the amino acid sequence comprises a cysteine (C) at a position in the polypeptide that corresponds to position 125 of SEQ ID NO: 1, a histidine (H) at a position in the polypeptide that corresponds to position 283 of SEQ ID NO: 1, an aspartic acid (D) at a position in the polypeptide that corresponds to position 305 of SEQ ID NO: 1, an aspartic acid (D) at a position in the polypeptide that corresponds to position 307 of SEQ ID NO: 1, and/or a lysine (K) at a position in the polypeptide that corresponds to position 115 of SEQ ID NO: 1. In some embodiments, the polypeptide having protease activity comprises an amino acid sequence having at least 50%, at least 60%, at least 70%, at least 80%, at least 81%, at least 82%, at least 83%, at least 84%, at least 85%, at least 86%, at least 87%, at least 88%, at least 89%, at least 90%, at least 91%, at least 92%, at least 93%, at least 94%, at least 95%, at least 96%, at least 97%, at least 98%, or at least 99% sequence identity to SEQ ID NO: 1, provided that the amino acid sequence comprises mutations of S128A, L153P, K324I, F333N, P205LG, E206T, wherein the positions correspond to SEQ ID NO: 1, and provided that the amino acid sequence comprises a cysteine (C) at a position in the polypeptide that corresponds to position 125 of SEQ ID NO: 1, a histidine (H) at a position in the polypeptide that corresponds to position 283 of SEQ ID NO: 1, an aspartic acid (D) at a position in the polypeptide that corresponds to position 305 of SEQ ID NO: 1, an aspartic acid (D) at a position in the polypeptide that corresponds to position 307 of SEQ ID NO: 1, and/or a lysine (K) at a position in the polypeptide that corresponds to position 115 of SEQ ID NO: 1. In some embodiments, the polypeptide having protease activity comprises an amino acid sequence having at least 50%, at least 60%, at least 70%, at least 80%, at least 81%, at least 82%, at least 83%, at least 84%, at least 85%, at least 86%, at least 87%, at least 88%, at least 89%, at least 90%, at least 91%, at least 92%, at least 93%, at least 94%, at least 95%, at least 96%, at least 97%, at least 98%, or at least 99% sequence identity to SEQ ID NO: 1, provided that the amino acid sequence comprises mutations of S128A, L153P, K324I, F333N, P205FG, E206T, wherein the positions correspond to SEQ ID NO: 1, and provided that the amino acid sequence comprises a cysteine (C) at a position in the polypeptide that corresponds to position 125 of SEQ ID NO: 1, a histidine (H) at a position in the polypeptide that corresponds to position 283 of SEQ ID NO: 1, an aspartic acid (D) at a position in the polypeptide that corresponds to position 305 of SEQ ID NO: 1, an aspartic acid (D) at a position in the polypeptide that corresponds to position 307 of SEQ ID NO: 1, and/or a lysine (K) at a position in the polypeptide that corresponds to position 115 of SEQ ID NO: 1. In some embodiments, the polypeptide having protease activity comprises an amino acid sequence having at least 50%, at least 60%, at least 70%, at least 80%, at least 81%, at least 82%, at least 83%, at least 84%, at least 85%, at least 86%, at least 87%, at least 88%, at least 89%, at least 90%, at least 91%, at least 92%, at least 93%, at least 94%, at least 95%, at least 96%, at least 97%, at least 98%, or at least 99% sequence identity to SEQ ID NO: 1, provided that the amino acid sequence comprises mutations of S128A, L153P, K324I, F333N, P205FG, E206T, R250GYG, S251I, wherein the positions correspond to SEQ ID NO: 1, and provided that the amino acid sequence comprises a cysteine (C) at a position in the polypeptide that corresponds to position 125 of SEQ ID NO: 1, a histidine (H) at a position in the polypeptide that corresponds to position 283 of SEQ ID NO: 1, an aspartic acid (D) at a position in the polypeptide that corresponds to position 305 of SEQ ID NO: 1, an aspartic acid (D) at a position in the polypeptide that corresponds to position 307 of SEQ ID NO: 1, and/or a lysine (K) at a position in the polypeptide that corresponds to position 115 of SEQ ID NO: 1. In some embodiments, the polypeptide having protease activity comprises an amino acid sequence having at least 50%, at least 60%, at least 70%, at least 80%, at least 81%, at least 82%, at least 83%, at least 84%, at least 85%, at least 86%, at least 87%, at least 88%, at least 89%, at least 90%, at least 91%, at least 92%, at least 93%, at least 94%, at least 95%, at least 96%, at least 97%, at least 98%, or at least 99% sequence identity to SEQ ID NO: 1, provided that the amino acid sequence comprises mutations of S128A, L153P, K324I, F333N, K149L, I262K, T276G, V364E, P205FG, E206T, R250GYG, S251I, wherein the positions correspond to SEQ ID NO: 1, and provided that the amino acid sequence comprises a cysteine ID NO: 1, and/or a lysine (K) at a position in the polypeptide that corresponds to position 115 of SEQ ID NO: 1. In some embodiments, the polypeptide having protease activity comprises an amino acid sequence having at least 50%, at least 60%, at least 70%, at least 80%, at least 81%, at least 82%, at least 83%, at least 84%, at least 85%, at least 86%, at least 87%, at least 88%, at least 89%, at least 90%, at least 91%, at least 92%, at least 93%, at least 94%, at least 95%, at least 96%, at least 97%, at least 98%, or at least 99% sequence identity to SEQ ID NO: 1, provided that the amino acid sequence comprises mutations of S128A, L153P, K324I, F333N, K149L, G199P, I262K, T276G, V364E, wherein the positions correspond to SEQ ID NO: 1, and provided that the amino acid sequence comprises a cysteine (C) at a position in the polypeptide that corresponds to position 125 of SEQ ID NO: 1, a histidine (H) at a position in the polypeptide that corresponds to position 283 of SEQ ID NO: 1, an aspartic acid (D) at a position in the polypeptide that corresponds to position 305 of SEQ ID NO: 1, an aspartic acid (D) at a position in the polypeptide that corresponds to position 307 of SEQ ID NO: 1, and/or a lysine (K) at a position in the polypeptide that corresponds to position 115 of SEQ ID NO: 1. In some embodiments, the polypeptide having protease activity comprises an amino acid sequence having at least 50%, at least 60%, at least 70%, at least 80%, at least 81%, at least 82%, at least 83%, at least 84%, at least 85%, at least 86%, at least 87%, at least 88%, at least 89%, at least 90%, at least 91%, at least 92%, at least 93%, at least 94%, at least 95%, at least 96%, at least 97%, at least 98%, or at least 99% sequence identity to SEQ ID NO: 1, provided that the amino acid sequence comprises mutations of S128A, L153P, K324I, F333N, K116D, K149L, N182D, K196D, I262K, T276G, V364E, wherein the positions correspond to SEQ ID NO: 1, and provided that the amino acid sequence comprises a cysteine (C) at a position in the polypeptide that corresponds to position 125 of SEQ ID NO: 1, a histidine (H) at a position in the polypeptide that corresponds to position 283 of SEQ ID NO: 1, an aspartic acid (D) at a position in the polypeptide that corresponds to position 305 of SEQ ID NO: 1, an aspartic acid (D) at a position in the polypeptide that corresponds to position 307 of SEQ ID NO: 1, and/or a lysine (K) at a position in the polypeptide that corresponds to position 115 of SEQ ID NO: 1. In some embodiments, the polypeptide having protease activity comprises an amino acid sequence having at least 50%, at least 60%, at least 70%, at least 80%, at least 81%, at least 82%, at least 83%, at least 84%, at least 85%, at least 86%, at least 87%, at least 88%, at least 89%, at least 90%, at least 91%, at least 92%, at least 93%, at least 94%, at least 95%, at least 96%, at least 97%, at least 98%, or at least 99% sequence identity to SEQ ID NO: 1, provided that the amino acid sequence comprises mutations of S128A, L153P, K324I, F333N, S94E, K116D, K149L, N182D, K196D, I262K, T276G, 1336A, V364E, wherein the positions correspond to SEQ ID NO: 1, and provided that the amino acid sequence comprises a cysteine (C) at a position in the polypeptide that corresponds to position 125 of SEQ ID NO: 1, a histidine (H) at a position in the polypeptide that corresponds to position 283 of SEQ ID NO: 1, an aspartic acid (D) at a position in the polypeptide that corresponds to position 305 of SEQ ID NO: 1, an aspartic acid (D) at a position in the polypeptide that corresponds to position 307 of SEQ ID NO: 1, and/or a lysine (K) at a position in the polypeptide that corresponds to position 115 of SEQ ID NO: 1. In some embodiments, the polypeptide having protease activity comprises an amino acid sequence having at least 50%, at least 60%, at least 70%, at least 80%, at least 81%, at least 82%, at least 83%, at least 84%, at least 85%, at least 86%, at least 87%, at least 88%, at least 89%, at least 90%, at least 91%, at least 92%, at least 93%, at least 94%, at least 95%, at least 96%, at least 97%, at least 98%, or at least 99% sequence identity to SEQ ID NO: 1, provided that the amino acid sequence comprises mutations of S128A, L153P, K324I, F333N, S94E, K116D, K149L, N182D, K196D, Y224T, I262K, T276G, 1336A, V364E, wherein the positions correspond to SEQ ID NO: 1, and provided that the amino acid sequence comprises a cysteine (C) at a position in the polypeptide that corresponds to position 125 of SEQ ID NO: 1, a histidine (H) at a position in the polypeptide that corresponds to position 283 of SEQ ID NO: 1, an aspartic acid (D) at a position in the polypeptide that corresponds to position 305 of SEQ ID NO: 1, an aspartic acid (D) at a position in the polypeptide that corresponds to position 307 of SEQ ID NO: 1, and/or a lysine (K) at a position in the polypeptide that corresponds to position 115 of SEQ ID NO: 1. In some embodiments, the polypeptide having protease activity comprises an amino acid sequence having at least 50%, at least 60%, at least 70%, at least 80%, at least 81%, at least 82%, at least 83%, at least 84%, at least 85%, at least 86%, at least 87%, at least 88%, at least 89%, at least 90%, at least 91%, at least 92%, at least 93%, at least 94%, at least 95%, at least 96%, at least 97%, at least 98%, or at least 99% sequence identity to SEQ ID NO: 1, provided that the amino acid sequence comprises mutations of S128A, L153P, K324I, F333N, S94E, K116D, K149L, N182D, K196D, Y224T, I262K, T276G, Y281T, 1336A, V364E, wherein the positions correspond to SEQ ID NO: 1, and provided that the amino acid sequence comprises a cysteine (C) at a position in the polypeptide that corresponds to position 125 of SEQ ID NO: 1, a histidine (H) at a position in the polypeptide that corresponds to position 283 of SEQ ID NO: 1, an aspartic acid (D) at a position in the polypeptide that corresponds to position 305 of SEQ ID NO: 1, an aspartic acid (D) at a position in the polypeptide that corresponds to position 307 of SEQ ID NO: 1, and/or a lysine (K) at a position in the polypeptide that corresponds to position 115 of SEQ ID NO: 1. In some embodiments, the polypeptide having protease activity comprises an amino acid sequence having at least 50%, at least 60%, at least 70%, at least 80%, at least 81%, at least 82%, at least 83%, at least 84%, at least 85%, at least 86%, at least 87%, at least 88%, at least 89%, at least 90%, at least 91%, at least 92%, at least 93%, at least 94%, at least 95%, at least 96%, at least 97%, at least 98%, or at least 99% sequence identity to SEQ ID NO: 1, provided that the amino acid sequence comprises mutations of S128A, L153P, K324I, F333N, S94E, K116D, K149L, N182D, K196D, Y224T, I262K, T276G, Y281T, 1336A, V364E, H174E, wherein the positions correspond to SEQ ID NO: 1, and provided that the amino acid sequence comprises a cysteine (C) at a position in the polypeptide that corresponds to position 125 of SEQ ID NO: 1, a histidine (H) at a position in the polypeptide that corresponds to position 283 of SEQ ID NO: 1, an aspartic acid (D) at a position in the polypeptide that corresponds to position 305 of SEQ ID NO: 1, an aspartic acid (D) at a position in the polypeptide that corresponds to position 307 of SEQ ID NO: 1, and/or a lysine (K) at a position in the polypeptide that corresponds to position 115 of SEQ ID NO: 1. In some embodiments, the polypeptide having protease activity comprises an amino acid sequence having at least 50%, at least 60%, at least 70%, at least 80%, at least 81%, at least 82%, at least 83%, at least 84%, at least 85%, at least 86%, at least 87%, at least 88%, at least 89%, at least 90%, at least 91%, at least 92%, at least 93%, at least 94%, at least 95%, at least 96%, at least 97%, at least 98%, or at least 99% sequence identity to SEQ ID NO: 1, provided that the amino acid sequence comprises mutations of S128A, L153P, K324I, F333N, S94E, K116D, K149L, N182D, K196D, Y224T, V270P, T276G, Y281T, 1336A, V364E, wherein the positions correspond to SEQ ID NO: 1, and provided that the amino acid sequence comprises a cysteine (C) at a position in the polypeptide that corresponds to position 125 of SEQ ID NO: 1, a histidine (H) at a position in the polypeptide that corresponds to position 283 of SEQ ID NO: 1, an aspartic acid (D) at a position in the polypeptide that corresponds to position 305 of SEQ ID NO: 1, an aspartic acid (D) at a position in the polypeptide that corresponds to position 307 of SEQ ID NO: 1, and/or a lysine (K) at a position in the polypeptide that corresponds to position 115 of SEQ ID NO: 1. In some embodiments, the polypeptide having protease activity comprises an amino acid sequence having at least 50%, at least 60%, at least 70%, at least 80%, at least 81%, at least 82%, at least 83%, at least 84%, at least 85%, at least 86%, at least 87%, at least 88%, at least 89%, at least 90%, at least 91%, at least 92%, at least 93%, at least 94%, at least 95%, at least 96%, at least 97%, at least 98%, or at least 99% sequence identity to SEQ ID NO: 1, provided that the amino acid sequence comprises mutations of S128A, L153P, K324I, F333N, S94E, K116D, K149L, N182D, K196D, Y224T, V270P, V274G, Y281T, 1336A, V364E, wherein the positions correspond to SEQ ID NO: 1, and provided that the amino acid sequence comprises a cysteine (C) at a position in the polypeptide that corresponds to position 125 of SEQ ID NO: 1, a histidine (H) at a position in the polypeptide that corresponds to position 283 of SEQ ID NO: 1, an aspartic acid (D) at a position in the polypeptide that corresponds to position 305 of SEQ ID NO: 1, an aspartic acid (D) at a position in the polypeptide that corresponds to position 307 of SEQ ID NO: 1, and/or a lysine (K) at a position in the polypeptide that corresponds to position 115 of SEQ ID NO: 1. In some embodiments, the polypeptide having protease activity comprises an amino acid sequence having at least 50%, at least 60%, at least 70%, at least 80%, at least 81%, at least 82%, at least 83%, at least 84%, at least 85%, at least 86%, at least 87%, at least 88%, at least 89%, at least 90%, at least 91%, at least 92%, at least 93%, at least 94%, at least 95%, at least 96%, at least 97%, at least 98%, or at least 99% sequence identity to SEQ ID NO: 1, provided that the amino acid sequence comprises mutations of S128A, L153P, K324I, F333N, S94E, K116D, K149L, N182D, G199P, Y224T, V270P, V274G, Y281T, 1336A, V364E, wherein the positions correspond to SEQ ID NO: 1, and provided that the amino acid sequence comprises a cysteine (C) at a position in the polypeptide that corresponds to position 125 of SEQ ID NO: 1, a histidine (H) at a position in the polypeptide that corresponds to position 283 of SEQ ID NO: 1, an aspartic acid (D) at a position in the polypeptide that corresponds to position 305 of SEQ ID NO: 1, an aspartic acid (D) at a position in the polypeptide that corresponds to position 307 of SEQ ID NO: 1, and/or a lysine (K) at a position in the polypeptide that corresponds to position 115 of SEQ ID NO: 1. In some embodiments, the polypeptide having protease activity comprises an amino acid sequence having at least 50%, at least 60%, at least 70%, at least 80%, at least 81%, at least 82%, at least 83%, at least 84%, at least 85%, at least 86%, at least 87%, at least 88%, at least 89%, at least 90%, at least 91%, at least 92%, at least 93%, at least 94%, at least 95%, at least 96%, at least 97%, at least 98%, or at least 99% sequence identity to SEQ ID NO: 1, provided that the amino acid sequence comprises mutations of S128A, L153P, K324I, F333N, K149L, K196D, I262K, T276G, V364E, wherein the positions correspond to SEQ ID NO: 1, and provided that the amino acid sequence comprises a cysteine (C) at a position in the polypeptide that corresponds to position 125 of SEQ ID NO: 1, a histidine (H) at a position in the polypeptide that corresponds to position 283 of SEQ ID NO: 1, an aspartic acid (D) at a position in the polypeptide that corresponds to position 305 of SEQ ID NO: 1, an aspartic acid (D) at a position in the polypeptide that corresponds to position 307 of SEQ ID NO: 1, and/or a lysine (K) at a position in the polypeptide that corresponds to position 115 of SEQ ID NO: 1. In some embodiments, the polypeptide having protease activity comprises an amino acid sequence having at least 50%, at least 60%, at least 70%, at least 80%, at least 81%, at least 82%, at least 83%, at least 84%, at least 85%, at least 86%, at least 87%, at least 88%, at least 89%, at least 90%, at least 91%, at least 92%, at least 93%, at least 94%, at least 95%, at least 96%, at least 97%, at least 98%, or at least 99% sequence identity to SEQ ID NO: 1, provided that the amino acid sequence comprises mutations of S128A, L153P, K324I, F333N, I262K, V274G, Y281T, wherein the positions correspond to SEQ ID NO: 1, and provided that the amino acid sequence comprises a cysteine (C) at a position in the polypeptide that corresponds to position 125 of SEQ ID NO: 1, a histidine (H) at a position in the polypeptide that corresponds to position 283 of SEQ ID NO: 1, an aspartic acid (D) at a position in the polypeptide that corresponds to position 305 of SEQ ID NO: 1, an aspartic acid (D) at a position in the polypeptide that corresponds to position 307 of SEQ ID NO: 1, and/or a lysine (K) at a position in the polypeptide that corresponds to position 115 of SEQ ID NO: 1. In some embodiments, the polypeptide having protease activity comprises an amino acid sequence having at least 50%, at least 60%, at least 70%, at least 80%, at least 81%, at least 82%, at least 83%, at least 84%, at least 85%, at least 86%, at least 87%, at least 88%, at least 89%, at least 90%, at least 91%, at least 92%, at least 93%, at least 94%, at least 95%, at least 96%, at least 97%, at least 98%, or at least 99% sequence identity to SEQ ID NO: 1, provided that the amino acid sequence comprises mutations of S128A, L153P, K324I, F333N, G199P, I262K, T276G, Y281T, wherein the positions correspond to SEQ ID NO: 1, and provided that the amino acid sequence comprises a cysteine (C) at a position in the polypeptide that corresponds to position 125 of SEQ ID NO: 1, a histidine (H) at a position in the polypeptide that corresponds to position 283 of SEQ ID NO: 1, an aspartic acid (D) at a position in the polypeptide that corresponds to position 305 of SEQ ID NO: 1, an aspartic acid (D) at a position in the polypeptide that corresponds to position 307 of SEQ ID NO: 1, and/or a lysine (K) at a position in the polypeptide that corresponds to position 115 of SEQ ID NO: 1. In some embodiments, the polypeptide having protease activity comprises an amino acid sequence having at least 50%, at least 60%, at least 70%, at least 80%, at least 81%, at least 82%, at least 83%, at least 84%, at least 85%, at least 86%, at least 87%, at least 88%, at least 89%, at least 90%, at least 91%, at least 92%, at least 93%, at least 94%, at least 95%, at least 96%, at least 97%, at least 98%, or at least 99% sequence identity to SEQ ID NO: 1, provided that the amino acid sequence comprises mutations of S128A, L153P, K324I, F333N, K196D, I262K, T276G, Y281T, wherein the positions correspond to SEQ ID NO: 1, and provided that the amino acid sequence comprises a cysteine (C) at a position in the polypeptide that corresponds to position 125 of SEQ ID NO: 1, a histidine (H) at a position in the polypeptide that corresponds to position 283 of SEQ ID NO: 1, an aspartic acid (D) at a position in the polypeptide that corresponds to position 305 of SEQ ID NO: 1, an aspartic acid (D) at a position in the polypeptide that corresponds to position 307 of SEQ ID NO: 1, and/or a lysine (K) at a position in the polypeptide that corresponds to position 115 of SEQ ID NO: 1. In some embodiments, the polypeptide having protease activity comprises an amino acid sequence having at least 50%, at least 60%, at least 70%, at least 80%, at least 81%, at least 82%, at least 83%, at least 84%, at least 85%, at least 86%, at least 87%, at least 88%, at least 89%, at least 90%, at least 91%, at least 92%, at least 93%, at least 94%, at least 95%, at least 96%, at least 97%, at least 98%, or at least 99% sequence identity to SEQ ID NO: 1, provided that the amino acid sequence comprises mutations of S128A, L153P, K324I, F333N, G199P, Y224T, 1262K, T276G, Y281T, wherein the positions correspond to SEQ ID NO: 1, and provided that the amino acid sequence comprises a cysteine (C) at a position in the polypeptide that corresponds to position 125 of SEQ ID NO: 1, a histidine (H) at a position in the polypeptide that corresponds to position 283 of SEQ ID NO: 1, an aspartic acid (D) at a position in the polypeptide that corresponds to position 305 of SEQ ID NO: 1, an aspartic acid (D) at a position in the polypeptide that corresponds to position 307 of SEQ ID NO: 1, and/or a lysine (K) at a position in the polypeptide that corresponds to position 115 of SEQ ID NO: 1. In some embodiments, the polypeptide having protease activity comprises an amino acid sequence having at least 50%, at least 60%, at least 70%, at least 80%, at least 81%, at least 82%, at least 83%, at least 84%, at least 85%, at least 86%, at least 87%, at least 88%, at least 89%, at least 90%, at least 91%, at least 92%, at least 93%, at least 94%, at least 95%, at least 96%, at least 97%, at least 98%, or at least 99% sequence identity to SEQ ID NO: 1, provided that the amino acid sequence comprises mutations of S128A, L153P, K324I, F333N, G199P, Y224T, I262K, T276G, Y281T, 1336A, wherein the positions correspond to SEQ ID NO: 1, and provided that the amino acid sequence comprises a cysteine (C) at a position in the polypeptide that corresponds to position 125 of SEQ ID NO: 1, a histidine (H) at a position in the polypeptide that corresponds to position 283 of SEQ ID NO: 1, an aspartic acid (D) at a position in the polypeptide that corresponds to position 305 of SEQ ID NO: 1, an aspartic acid (D) at a position in the polypeptide that corresponds to position 307 of SEQ ID NO: 1, and/or a lysine (K) at a position in the polypeptide that corresponds to position 115 of SEQ ID NO: 1. In some embodiments, the polypeptide having protease activity comprises an amino acid sequence having at least 50%, at least 60%, at least 70%, at least 80%, at least 81%, at least 82%, at least 83%, at least 84%, at least 85%, at least 86%, at least 87%, at least 88%, at least 89%, at least 90%, at least 91%, at least 92%, at least 93%, at least 94%, at least 95%, at least 96%, at least 97%, at least 98%, or at least 99% sequence identity to SEQ ID NO: 1, provided that the amino acid sequence comprises mutations of S128A, L153P, K324I, F333N, K149L, G199P, Y224T, I262K, T276G, Y281T, 1336A, V364E, wherein the positions correspond to SEQ ID NO: 1, and provided that the amino acid sequence comprises a cysteine (C) at a position in the polypeptide that corresponds to position 125 of SEQ ID NO: 1, a histidine (H) at a position in the polypeptide that corresponds to position 283 of SEQ ID NO: 1, an aspartic acid (D) at a position in the polypeptide that corresponds to position 305 of SEQ ID NO: 1, an aspartic acid (D) at a position in the polypeptide that corresponds to position 307 of SEQ ID NO: 1, and/or a lysine (K) at a position in the polypeptide that corresponds to position 115 of SEQ ID NO: 1. In some embodiments, the polypeptide having protease activity comprises an amino acid sequence having at least 50%, at least 60%, at least 70%, at least 80%, at least 81%, at least 82%, at least 83%, at least 84%, at least 85%, at least 86%, at least 87%, at least 88%, at least 89%, at least 90%, at least 91%, at least 92%, at least 93%, at least 94%, at least 95%, at least 96%, at least 97%, at least 98%, or at least 99% sequence identity to SEQ ID NO: 1, provided that the amino acid sequence comprises mutations of S128A, L153P, K324I, F333N, K149L, K196D, Y224T, I262K, T276G, Y281T, 1336A, V364E, wherein the positions correspond to SEQ ID NO: 1, and provided that the amino acid sequence comprises a cysteine (C) at a position in the polypeptide that corresponds to position 125 of SEQ ID NO: 1, a histidine (H) at a position in the polypeptide that corresponds to position 283 of SEQ ID NO: 1, an aspartic acid (D) at a position in the polypeptide that corresponds to position 305 of SEQ ID NO: 1, an aspartic acid (D) at a position in the polypeptide that corresponds to position 307 of SEQ ID NO: 1, and/or a lysine (K) at a position in the polypeptide that corresponds to position 115 of SEQ ID NO: 1. In some embodiments, the polypeptide having protease activity comprises an amino acid sequence having at least 50%, at least 60%, at least 70%, at least 80%, at least 81%, at least 82%, at least 83%, at least 84%, at least 85%, at least 86%, at least 87%, at least 88%, at least 89%, at least 90%, at least 91%, at least 92%, at least 93%, at least 94%, at least 95%, at least 96%, at least 97%, at least 98%, or at least 99% sequence identity to SEQ ID NO: 1, provided that the amino acid sequence comprises mutations of S128A, L153P, K324I, F333N, K149L, G199P, Y224T, I262K, T276G, Y281T, 1336A, V364E, H174E, wherein the positions correspond to SEQ ID NO: 1, and provided that the amino acid sequence comprises a cysteine (C) at a position in the polypeptide that corresponds to position 125 of SEQ ID NO: 1, a histidine (H) at a position in the polypeptide that corresponds to position 283 of SEQ ID NO: 1, an aspartic acid (D) at a position in the polypeptide that corresponds to position 305 of SEQ ID NO: 1, an aspartic acid (D) at a position in the polypeptide that corresponds to position 307 of SEQ ID NO: 1, and/or a lysine (K) at a position in the polypeptide that corresponds to position 115 of SEQ ID NO: 1. In some embodiments, the polypeptide having protease activity comprises an amino acid sequence having at least 50%, at least 60%, at least 70%, at least 80%, at least 81%, at least 82%, at least 83%, at least 84%, at least 85%, at least 86%, at least 87%, at least 88%, at least 89%, at least 90%, at least 91%, at least 92%, at least 93%, at least 94%, at least 95%, at least 96%, at least 97%, at least 98%, or at least 99% sequence identity to SEQ ID NO: 1, provided that the amino acid sequence comprises mutations of S128A, L153P, K324I, F333N, S94E, K116D, K149L, N182D, K196D, Y224T, I262K, T276G, Y281T, V303I, 1336A, V364E, wherein the positions correspond to SEQ ID NO: 1, and provided that the amino acid sequence comprises a cysteine (C) at a position in the polypeptide that corresponds to position 125 of SEQ ID NO: 1, a histidine (H) at a position in the polypeptide that corresponds to position 283 of SEQ ID NO: 1, an aspartic acid (D) at a position in the polypeptide that corresponds to position 305 of SEQ ID NO: 1, an aspartic acid (D) at a position in the polypeptide that corresponds to position 307 of SEQ ID NO: 1, and/or a lysine (K) at a position in the polypeptide that corresponds to position 115 of SEQ ID NO: 1. In some embodiments, the polypeptide having protease activity comprises an amino acid sequence having at least 50%, at least 60%, at least 70%, at least 80%, at least 81%, at least 82%, at least 83%, at least 84%, at least 85%, at least 86%, at least 87%, at least 88%, at least 89%, at least 90%, at least 91%, at least 92%, at least 93%, at least 94%, at least 95%, at least 96%, at least 97%, at least 98%, or at least 99% sequence identity to SEQ ID NO: 1, provided that the amino acid sequence comprises mutations of, T122S, S128A, L153P, F333N, K324I, N162E, K229E, H275Y, N219G, H174E, 177_183delinsRDNRDN (SEQ ID NO: 919), wherein the positions correspond to SEQ ID NO: 1, and provided that the amino acid sequence comprises a cysteine (C) at a position in the polypeptide that corresponds to position 125 of SEQ ID NO: 1, a histidine (H) at a position in the polypeptide that corresponds to position 283 of SEQ ID NO: 1, an aspartic acid (D) at a position in the polypeptide that corresponds to position 305 of SEQ ID NO: 1, an aspartic acid (D) at a position in the polypeptide that corresponds to position 307 of SEQ ID NO: 1, and/or a lysine (K) at a position in the polypeptide that corresponds to position 115 of SEQ ID NO: 1. In some embodiments, the polypeptide having protease activity comprises an amino acid sequence having at least 50%, at least 60%, at least 70%, at least 80%, at least 81%, at least 82%, at least 83%, at least 84%, at least 85%, at least 86%, at least 87%, at least 88%, at least 89%, at least 90%, at least 91%, at least 92%, at least 93%, at least 94%, at least 95%, at least 96%, at least 97%, at least 98%, or at least 99% sequence identity to SEQ ID NO: 1, provided that the amino acid sequence comprises mutations of S128A, L153P, K324I, F333N, 311_321delinsLSNVEALGYNITSGYSDKRY (SEQ ID NO: 939), wherein the positions correspond to SEQ ID NO: 1, and provided that the amino acid sequence comprises a cysteine (C) at a position in the polypeptide that corresponds to position 125 of SEQ ID NO: 1, a histidine (H) at a position in the polypeptide that corresponds to position 283 of SEQ ID NO: 1, an aspartic acid (D) at a position in the polypeptide that corresponds to position 305 of SEQ ID NO: 1, an aspartic acid (D) at a position in the polypeptide that corresponds to position 307 of SEQ ID NO: 1, and/or a lysine (K) at a position in the polypeptide that corresponds to position 115 of SEQ ID NO: 1. In some embodiments, the polypeptide having protease activity comprises an amino acid sequence having at least 50%, at least 60%, at least 70%, at least 80%, at least 81%, at least 82%, at least 83%, at least 84%, at least 85%, at least 86%, at least 87%, at least 88%, at least 89%, at least 90%, at least 91%, at least 92%, at least 93%, at least 94%, at least 95%, at least 96%, at least 97%, at least 98%, or at least 99% sequence identity to SEQ ID NO: 1, provided that the amino acid sequence comprises mutations of S128A, L153P, K324I, F333N, 310_320delinsFLVFGVTYDGSTPVP (SEQ ID NO: 940), wherein the positions correspond to SEQ ID NO: 1, and provided that the amino acid sequence comprises a cysteine (C) at a position in the polypeptide that corresponds to position 125 of SEQ ID NO: 1, a histidine (H) at a position in the polypeptide that corresponds to position 283 of SEQ ID NO: 1, an aspartic acid (D) at a position in the polypeptide that corresponds to position 305 of SEQ ID NO: 1, an aspartic acid (D) at a position in the polypeptide that corresponds to position 307 of SEQ ID NO: 1, and/or a lysine (K) at a position in the polypeptide that corresponds to position 115 of SEQ ID NO: 1. In some embodiments, the polypeptide having protease activity comprises an amino acid sequence having at least 50%, at least 60%, at least 70%, at least 80%, at least 81%, at least 82%, at least 83%, at least 84%, at least 85%, at least 86%, at least 87%, at least 88%, at least 89%, at least 90%, at least 91%, at least 92%, at least 93%, at least 94%, at least 95%, at least 96%, at least 97%, at least 98%, or at least 99% sequence identity to SEQ ID NO: 1, provided that the amino acid sequence comprises mutations of S128A, L153P, K324I, F333N, 307_322delinsLAKGNNYFGHWHFAVM (SEQ ID NO: 936), wherein the positions correspond to SEQ ID NO: 1, and provided that the amino acid sequence comprises a cysteine (C) at a position in the polypeptide that corresponds to position 125 of SEQ ID NO: 1, a histidine (H) at a position in the polypeptide that corresponds to position 283 of SEQ ID NO: 1, an aspartic acid (D) at a position in the polypeptide that corresponds to position 305 of SEQ ID NO: 1, an aspartic acid (D) at a position in the polypeptide that corresponds to position 307 of SEQ ID NO: 1, and/or a lysine (K) at a position in the polypeptide that corresponds to position 115 of SEQ ID NO: 1. In some embodiments, the polypeptide having protease activity comprises an amino acid sequence having at least 50%, at least 60%, at least 70%, at least 80%, at least 81%, at least 82%, at least 83%, at least 84%, at least 85%, at least 86%, at least 87%, at least 88%, at least 89%, at least 90%, at least 91%, at least 92%, at least 93%, at least 94%, at least 95%, at least 96%, at least 97%, at least 98%, or at least 99% sequence identity to SEQ ID NO: 1, provided that the amino acid sequence comprises mutations of S128A, L153P, K324I, F333N, 86_105delinsDDMEAKGNNYFGHWHFAVATN (SEQ ID NO: 941), wherein the positions correspond to SEQ ID NO: 1, and provided that the amino acid sequence comprises a cysteine aspartic acid (D) at a position in the polypeptide that corresponds to position 305 of SEQ ID NO: 1, an aspartic acid (D) at a position in the polypeptide that corresponds to position 307 of SEQ ID NO: 1, and/or a lysine (K) at a position in the polypeptide that corresponds to position 115 of SEQ ID NO: 1. In some embodiments, the polypeptide having protease activity comprises an amino acid sequence having at least 50%, at least 60%, at least 70%, at least 80%, at least 81%, at least 82%, at least 83%, at least 84%, at least 85%, at least 86%, at least 87%, at least 88%, at least 89%, at least 90%, at least 91%, at least 92%, at least 93%, at least 94%, at least 95%, at least 96%, at least 97%, at least 98%, or at least 99% sequence identity to SEQ ID NO: 1, provided that the amino acid sequence comprises mutations of S128A, L153P, K324I, F333N, 271_287delinsVGISGSAGGIKSVDSDGDSYI (SEQ ID NO: 932), wherein the positions correspond to SEQ ID NO: 1, and provided that the amino acid sequence comprises a cysteine (C) at a position in the polypeptide that corresponds to position 125 of SEQ ID NO: 1, a histidine (H) at a position in the polypeptide that corresponds to position 283 of SEQ ID NO: 1, an aspartic acid (D) at a position in the polypeptide that corresponds to position 305 of SEQ ID NO: 1, an aspartic acid (D) at a position in the polypeptide that corresponds to position 307 of SEQ ID NO: 1, and/or a lysine (K) at a position in the polypeptide that corresponds to position 115 of SEQ ID NO: 1. In some embodiments, the polypeptide having protease activity comprises an amino acid sequence having at least 50%, at least 60%, at least 70%, at least 80%, at least 81%, at least 82%, at least 83%, at least 84%, at least 85%, at least 86%, at least 87%, at least 88%, at least 89%, at least 90%, at least 91%, at least 92%, at least 93%, at least 94%, at least 95%, at least 96%, at least 97%, at least 98%, or at least 99% sequence identity to SEQ ID NO: 1, provided that the amino acid sequence comprises mutations of S128A, L153P, K324I, F333N, 91_100delinsGGGGGKSVDSDGDSYGGGGG (SEQ ID NO: 943), wherein the positions correspond to SEQ ID NO: 1, and provided that the amino acid sequence comprises a cysteine (C) at a position in the polypeptide that corresponds to position 125 of SEQ ID NO: 1, a histidine (H) at a position in the polypeptide that corresponds to position 283 of SEQ ID NO: 1, an aspartic acid (D) at a position in the polypeptide that corresponds to position 305 of SEQ ID NO: 1, an aspartic acid (D) at a position in the polypeptide that corresponds to position 307 of SEQ ID NO: 1, and/or a lysine (K) at a position in the polypeptide that corresponds to position 115 of SEQ ID NO: 1. In some embodiments, the polypeptide having protease activity comprises an amino acid sequence having at least 50%, at least 60%, at least 70%, at least 80%, at least 81%, at least 82%, at least 83%, at least 84%, at least 85%, at least 86%, at least 87%, at least 88%, at least 89%, at least 90%, at least 91%, at least 92%, at least 93%, at least 94%, at least 95%, at least 96%, at least 97%, at least 98%, or at least 99% sequence identity to SEQ ID NO: 1, provided that the amino acid sequence comprises mutations of S128A, L153P, K324I, F333N, 308_324delinsTKSVDSDGDSYKINY (SEQ ID NO: 932), wherein the positions correspond to SEQ ID NO: 1, and provided that the amino acid sequence comprises a cysteine (C) at a position in the polypeptide that corresponds to position 125 of SEQ ID NO: 1, a histidine (H) at a position in the polypeptide that corresponds to position 283 of SEQ ID NO: 1, an aspartic acid (D) at a position in the polypeptide that corresponds to position 305 of SEQ ID NO: 1, an aspartic acid (D) at a position in the polypeptide that corresponds to position 307 of SEQ ID NO: 1, and/or a lysine (K) at a position in the polypeptide that corresponds to position 115 of SEQ ID NO: 1. In some embodiments, the polypeptide having protease activity comprises an amino acid sequence having at least 50%, at least 60%, at least 70%, at least 80%, at least 81%, at least 82%, at least 83%, at least 84%, at least 85%, at least 86%, at least 87%, at least 88%, at least 89%, at least 90%, at least 91%, at least 92%, at least 93%, at least 94%, at least 95%, at least 96%, at least 97%, at least 98%, or at least 99% sequence identity to SEQ ID NO: 1, provided that the amino acid sequence comprises mutations of S128A, L153P, K324I, F333N, 311_319delinsLLKPKILGYNITSGYSDEIY (SEQ ID NO: 938), wherein the positions correspond to SEQ ID NO: 1, and provided that the amino acid sequence comprises a cysteine (C) at a position in the polypeptide that corresponds to position 125 of SEQ ID NO: 1, a histidine (H) at a position in the polypeptide that corresponds to position 283 of SEQ ID NO: 1, an aspartic acid (D) at a position in the polypeptide that corresponds to position 305 of SEQ ID NO: 1, an aspartic acid (D) at a position in the polypeptide that corresponds to position 307 of SEQ ID NO: 1, and/or a lysine (K) at a position in the polypeptide that corresponds to position 115 of SEQ ID NO: 1. In some embodiments, the polypeptide having protease activity comprises an amino acid sequence having at least 50%, at least 60%, at least 70%, at least 80%, at least 81%, at least 82%, at least 83%, at least 84%, at least 85%, at least 86%, at least 87%, at least 88%, at least 89%, at least 90%, at least 91%, at least 92%, at least 93%, at least 94%, at least 95%, at least 96%, at least 97%, at least 98%, or at least 99% sequence identity to SEQ ID NO: 1, provided that the amino acid sequence comprises mutations of S128A, L153P, K324I, F333N, 315_317delinsVTYDGST (SEQ ID NO: 946), wherein the positions correspond to SEQ ID NO: 1, and provided that the amino acid sequence comprises a cysteine (C) at a position in the polypeptide that corresponds to position 125 of SEQ ID NO: 1, a histidine (H) at a position in the polypeptide that corresponds to position 283 of SEQ ID NO: 1, an aspartic acid (D) at a position in the polypeptide that corresponds to position 305 of SEQ ID NO: 1, an aspartic acid (D) at a position in the polypeptide that corresponds to position 307 of SEQ ID NO: 1, and/or a lysine (K) at a position in the polypeptide that corresponds to position 115 of SEQ ID NO: 1. In some embodiments, the polypeptide having protease activity comprises an amino acid sequence having at least 50%, at least 60%, at least 70%, at least 80%, at least 81%, at least 82%, at least 83%, at least 84%, at least 85%, at least 86%, at least 87%, at least 88%, at least 89%, at least 90%, at least 91%, at least 92%, at least 93%, at least 94%, at least 95%, at least 96%, at least 97%, at least 98%, or at least 99% sequence identity to SEQ ID NO: 1, provided that the amino acid sequence comprises mutations of S128A, L153P, K324I, F333N, 303_326delinsTGAKGNNYFGHWHFAVRVRL (SEQ ID NO: 933), wherein the positions correspond to SEQ ID NO: 1, and provided that the amino acid sequence comprises a cysteine (C) at a position in the polypeptide that corresponds to position 125 of SEQ ID NO: 1, a histidine (H) at a position in the polypeptide that corresponds to position 283 of SEQ ID NO: 1, an aspartic acid (D) at a position in the polypeptide that corresponds to position 305 of SEQ ID NO: 1, an aspartic acid (D) at a position in the polypeptide that corresponds to position 307 of SEQ ID NO: 1, and/or a lysine (K) at a position in the polypeptide that corresponds to position 115 of SEQ ID NO: 1. In some embodiments, the polypeptide having protease activity comprises an amino acid sequence having at least 50%, at least 60%, at least 70%, at least 80%, at least 81%, at least 82%, at least 83%, at least 84%, at least 85%, at least 86%, at least 87%, at least 88%, at least 89%, at least 90%, at least 91%, at least 92%, at least 93%, at least 94%, at least 95%, at least 96%, at least 97%, at least 98%, or at least 99% sequence identity to SEQ ID NO: 1, provided that the amino acid sequence comprises mutations of S128A, L153P, K324I, F333N, 93_98delinsGGGGGKSVDSDGDSYGGGGG (SEQ ID NO: 943), wherein the positions correspond to SEQ ID NO: 1, and provided that the amino acid sequence comprises a cysteine (C) at a position in the polypeptide that corresponds to position 125 of SEQ ID NO: 1, a histidine (H) at a position in the polypeptide that corresponds to position 283 of SEQ ID NO: 1, an aspartic acid (D) at a position in the polypeptide that corresponds to position 305 of SEQ ID NO: 1, an aspartic acid (D) at a position in the polypeptide that corresponds to position 307 of SEQ ID NO: 1, and/or a lysine (K) at a position in the polypeptide that corresponds to position 115 of SEQ ID NO: 1. In some embodiments, the polypeptide having protease activity comprises an amino acid sequence having at least 50%, at least 60%, at least 70%, at least 80%, at least 81%, at least 82%, at least 83%, at least 84%, at least 85%, at least 86%, at least 87%, at least 88%, at least 89%, at least 90%, at least 91%, at least 92%, at least 93%, at least 94%, at least 95%, at least 96%, at least 97%, at least 98%, or at least 99% sequence identity to SEQ ID NO: 1, provided that the amino acid sequence comprises mutations of S128A, L153P, K324I, F333N, 174_187delinsVMYKGKKLLEAARAGQPDSSE (SEQ ID NO: 945), wherein the positions correspond to SEQ ID NO: 1, and provided that the amino acid sequence comprises a cysteine (C) at a position in the polypeptide that corresponds to position 125 of SEQ ID NO: 1, a histidine (H) at a position in the polypeptide that corresponds to position 283 of SEQ ID NO: 1, an aspartic acid (D) at a position in the polypeptide that corresponds to position 305 of SEQ ID NO: 1, an aspartic acid (D) at a position in the polypeptide that corresponds to position 307 of SEQ ID NO: 1, and/or a lysine (K) at a position in the polypeptide that corresponds to position 115 of SEQ ID NO: 1. In some embodiments, the polypeptide having protease activity comprises an amino acid sequence having at least 50%, at least 60%, at least 70%, at least 80%, at least 81%, at least 82%, at least 83%, at least 84%, at least 85%, at least 86%, at least 87%, at least 88%, at least 89%, at least 90%, at least 91%, at least 92%, at least 93%, at least 94%, at least 95%, at least 96%, at least 97%, at least 98%, or at least 99% sequence identity to SEQ ID NO: 1, provided that the amino acid sequence comprises mutations of S128A, L153P, K324I, F333N, 306_324delinsGHYGVYNGVTYWGHTPLHLAAMLGHLVYGLY (SEQ ID NO: 934), wherein the positions correspond to SEQ ID NO: 1, and provided that the amino acid sequence comprises a cysteine (C) at a position in the polypeptide that corresponds to position 125 of SEQ ID NO: 1, a histidine (H) at a position in the polypeptide that corresponds to position 283 of SEQ ID NO: 1, an aspartic acid (D) at a position in the polypeptide that corresponds to position 305 of SEQ ID NO: 1, an aspartic acid (D) at a position in the polypeptide that corresponds to position 307 of SEQ ID NO: 1, and/or a lysine (K) at a position in the polypeptide that corresponds to position 115 of SEQ ID NO: 1. In some embodiments, the polypeptide having protease activity comprises an amino acid sequence having at least 50%, at least 60%, at least 70%, at least 80%, at least 81%, at least 82%, at least 83%, at least 84%, at least 85%, at least 86%, at least 87%, at least 88%, at least 89%, at least 90%, at least 91%, at least 92%, at least 93%, at least 94%, at least 95%, at least 96%, at least 97%, at least 98%, or at least 99% sequence identity to SEQ ID NO: 1, provided that the amino acid sequence comprises mutations of S128A, L153P, K324I, F333N, 306_324delinsQRTPLHLAAWADHLYR (SEQ ID NO: 935), wherein the positions correspond to SEQ ID NO: 1, and provided that the amino acid sequence comprises a cysteine (C) at a position in the polypeptide that corresponds to position 125 of SEQ ID NO: 1, a histidine (H) at a position in the polypeptide that corresponds to position 283 of SEQ ID NO: 1, an aspartic acid (D) at a position in the polypeptide that corresponds to position 305 of SEQ ID NO: 1, an aspartic acid (D) at a position in the polypeptide that corresponds to position 307 of SEQ ID NO: 1, and/or a lysine (K) at a position in the polypeptide that corresponds to position 115 of SEQ ID NO: 1. In some embodiments, the polypeptide having protease activity comprises an amino acid sequence having at least 50%, at least 60%, at least 70%, at least 80%, at least 81%, at least 82%, at least 83%, at least 84%, at least 85%, at least 86%, at least 87%, at least 88%, at least 89%, at least 90%, at least 91%, at least 92%, at least 93%, at least 94%, at least 95%, at least 96%, at least 97%, at least 98%, or at least 99% sequence identity to SEQ ID NO: 1, provided that the amino acid sequence comprises mutations of S128A, L153P, K324I, F333N, 307_324delinsGGFAFDISIDNGNEDVY (SEQ ID NO: 937), wherein the positions correspond to SEQ ID NO: 1, and provided that the amino acid sequence comprises a cysteine (C) at a position in the polypeptide that corresponds to position 125 of SEQ ID NO: 1, a histidine (H) at a position in the polypeptide that corresponds to position 283 of SEQ ID NO: 1, an aspartic acid (D) at a position in the polypeptide that corresponds to position 305 of SEQ ID NO: 1, an aspartic acid (D) at a position in the polypeptide that corresponds to position 307 of SEQ ID NO: 1, and/or a lysine (K) at a position in the polypeptide that corresponds to position 115 of SEQ ID NO: 1. In some embodiments, the polypeptide having protease activity comprises an amino acid sequence having at least 50%, at least 60%, at least 70%, at least 80%, at least 81%, at least 82%, at least 83%, at least 84%, at least 85%, at least 86%, at least 87%, at least 88%, at least 89%, at least 90%, at least 91%, at least 92%, at least 93%, at least 94%, at least 95%, at least 96%, at least 97%, at least 98%, or at least 99% sequence identity to SEQ ID NO: 1, provided that the amino acid sequence comprises mutations of S128A, L153P, K324I, F333N, 88_102delinsGEIVAFDISIDNGNEDLAEILQLSTYDGGG (SEQ ID NO: 942), wherein the positions correspond to SEQ ID NO: 1, and provided that the amino acid sequence comprises a cysteine (C) at a position in the polypeptide that corresponds to position 125 of SEQ ID NO: 1, a histidine (H) at a position in the polypeptide that corresponds to position 283 of SEQ ID NO: 1, an aspartic acid (D) at a position in the polypeptide that corresponds to position 305 of SEQ ID NO: 1, an aspartic acid (D) at a position in the polypeptide that corresponds to position 307 of SEQ ID NO: 1, and/or a lysine (K) at a position in the polypeptide that corresponds to position 115 of SEQ ID NO: 1. In some embodiments, the polypeptide having protease activity comprises an amino acid sequence having at least 50%, at least 60%, at least 70%, at least 80%, at least 81%, at least 82%, at least 83%, at least 84%, at least 85%, at least 86%, at least 87%, at least 88%, at least 89%, at least 90%, at least 91%, at least 92%, at least 93%, at least 94%, at least 95%, at least 96%, at least 97%, at least 98%, or at least 99% sequence identity to SEQ ID NO: 1, provided that the amino acid sequence comprises mutations of S128A, L153P, K324I, F333N, 311_321delinsLSNVEALGYNITSGYSDKRY (SEQ ID NO: 939), 86_105delinsDDMEAKGNNYFGHWHFAVATN (SEQ ID NO: 941), 271_287delinsVGISGSAGGIKSVDSDGDSYI (SEQ ID NO: 932), wherein the positions correspond to SEQ ID NO: 1, and provided that the amino acid sequence comprises a cysteine (C) at a position in the polypeptide that corresponds to position 125 of SEQ ID NO: 1, a histidine (H) at a position in the polypeptide that corresponds to position 283 of SEQ ID NO: 1, an aspartic acid (D) at a position in the polypeptide that corresponds to position 305 of SEQ ID NO: 1, an aspartic acid (D) at a position in the polypeptide that corresponds to position 307 of SEQ ID NO: 1, and/or a lysine (K) at a position in the polypeptide that corresponds to position 115 of SEQ ID NO: 1. In some embodiments, the polypeptide having protease activity comprises an amino acid sequence having at least 50%, at least 60%, at least 70%, at least 80%, at least 81%, at least 82%, at least 83%, at least 84%, at least 85%, at least 86%, at least 87%, at least 88%, at least 89%, at least 90%, at least 91%, at least 92%, at least 93%, at least 94%, at least 95%, at least 96%, at least 97%, at least 98%, or at least 99% sequence identity to SEQ ID NO: 1, provided that the amino acid sequence comprises mutations of S128A, L153P, K324I, F333N, 311_321delinsLSNVEALGYNITSGYSDKRY (SEQ ID NO: 939), 86_105delinsDDMEAKGNNYFGHWHFAVATN (SEQ ID NO: 941), wherein the positions correspond to SEQ ID NO: 1, and provided that the amino acid sequence comprises a cysteine ID NO: 1, and/or a lysine (K) at a position in the polypeptide that corresponds to position 115 of SEQ ID NO: 1. In some embodiments, the polypeptide having protease activity comprises an amino acid sequence having at least 50%, at least 60%, at least 70%, at least 80%, at least 81%, at least 82%, at least 83%, at least 84%, at least 85%, at least 86%, at least 87%, at least 88%, at least 89%, at least 90%, at least 91%, at least 92%, at least 93%, at least 94%, at least 95%, at least 96%, at least 97%, at least 98%, or at least 99% sequence identity to SEQ ID NO: 1, provided that the amino acid sequence comprises mutations of S128A, L153P, K324I, F333N, 311_321delinsLSNVEALGYNITSGYSDKRY (SEQ ID NO: 939), 91_100delinsGGGGGKSVDSDGDSYGGGGG (SEQ ID NO: 943), wherein the positions correspond to SEQ ID NO: 1, and provided that the amino acid sequence comprises a cysteine (C) at a position in the polypeptide that corresponds to position 125 of SEQ ID NO: 1, a histidine (H) at a position in the polypeptide that corresponds to position 283 of SEQ ID NO: 1, an aspartic acid (D) at a position in the polypeptide that corresponds to position 305 of SEQ ID NO: 1, an aspartic acid (D) at a position in the polypeptide that corresponds to position 307 of SEQ ID NO: 1, and/or a lysine (K) at a position in the polypeptide that corresponds to position 115 of SEQ ID NO: 1. In some embodiments, the polypeptide having protease activity comprises an amino acid sequence having at least 50%, at least 60%, at least 70%, at least 80%, at least 81%, at least 82%, at least 83%, at least 84%, at least 85%, at least 86%, at least 87%, at least 88%, at least 89%, at least 90%, at least 91%, at least 92%, at least 93%, at least 94%, at least 95%, at least 96%, at least 97%, at least 98%, or at least 99% sequence identity to SEQ ID NO: 1, provided that the amino acid sequence comprises mutations of S128A, L153P, K324I, F333N, 311_321delinsLSNVEALGYNITSGYSDKRY (SEQ ID NO: 939), 271_287delinsVGISGSAGGIKSVDSDGDSYI (SEQ ID NO: 932), wherein the positions correspond to SEQ ID NO: 1, and provided that the amino acid sequence comprises a cysteine (C) at a position in the polypeptide that corresponds to position 125 of SEQ ID NO: 1, a histidine (H) at a position in the polypeptide that corresponds to position 283 of SEQ ID NO: 1, an aspartic acid (D) at a position in the polypeptide that corresponds to position 305 of SEQ ID NO: 1, an aspartic acid (D) at a position in the polypeptide that corresponds to position 307 of SEQ ID NO: 1, and/or a lysine (K) at a position in the polypeptide that corresponds to position 115 of SEQ ID NO: 1. In some embodiments, the polypeptide having protease activity comprises an amino acid sequence having at least 50%, at least 60%, at least 70%, at least 80%, at least 81%, at least 82%, at least 83%, at least 84%, at least 85%, at least 86%, at least 87%, at least 88%, at least 89%, at least 90%, at least 91%, at least 92%, at least 93%, at least 94%, at least 95%, at least 96%, at least 97%, at least 98%, or at least 99% sequence identity to SEQ ID NO: 1, provided that the amino acid sequence comprises mutations of S128A, L153P, K324I, F333N, 310_320delinsFLVFGVTYDGSTPVP (SEQ ID NO: 940), 86_105delinsDDMEAKGNNYFGHWHFAVATN (SEQ ID NO: 941), 271_287delinsVGISGSAGGIKSVDSDGDSYI (SEQ ID NO: 932), wherein the positions correspond to SEQ ID NO: 1, and provided that the amino acid sequence comprises a cysteine (C) at a position in the polypeptide that corresponds to position 125 of SEQ ID NO: 1, a histidine (H) at a position in the polypeptide that corresponds to position 283 of SEQ ID NO: 1, an aspartic acid (D) at a position in the polypeptide that corresponds to position 305 of SEQ ID NO: 1, an aspartic acid (D) at a position in the polypeptide that corresponds to position 307 of SEQ ID NO: 1, and/or a lysine (K) at a position in the polypeptide that corresponds to position 115 of SEQ ID NO: 1. In some embodiments, the polypeptide having protease activity comprises an amino acid sequence having at least 50%, at least 60%, at least 70%, at least 80%, at least 81%, at least 82%, at least 83%, at least 84%, at least 85%, at least 86%, at least 87%, at least 88%, at least 89%, at least 90%, at least 91%, at least 92%, at least 93%, at least 94%, at least 95%, at least 96%, at least 97%, at least 98%, or at least 99% sequence identity to SEQ ID NO: 1, provided that the amino acid sequence comprises mutations of S128A, L153P, K324I, F333N, 310_320delinsFLVFGVTYDGSTPVP (SEQ ID NO: 940), 86_105delinsDDMEAKGNNYFGHWHFAVATN (SEQ ID NO: 941), wherein the positions correspond to SEQ ID NO: 1, and provided that the amino acid sequence comprises a cysteine (C) at a position in the polypeptide that corresponds to position 125 of SEQ ID NO: 1, a histidine (H) at a position in the polypeptide that corresponds to position 283 of SEQ ID NO: 1, an aspartic acid (D) at a position in the polypeptide that corresponds to position 305 of SEQ ID NO: 1, an aspartic acid (D) at a position in the polypeptide that corresponds to position 307 of SEQ ID NO: 1, and/or a lysine (K) at a position in the polypeptide that corresponds to position 115 of SEQ ID NO: 1. In some embodiments, the polypeptide having protease activity comprises an amino acid sequence having at least 50%, at least 60%, at least 70%, at least 80%, at least 81%, at least 82%, at least 83%, at least 84%, at least 85%, at least 86%, at least 87%, at least 88%, at least 89%, at least 90%, at least 91%, at least 92%, at least 93%, at least 94%, at least 95%, at least 96%, at least 97%, at least 98%, or at least 99% sequence identity to SEQ ID NO: 1, provided that the amino acid sequence comprises mutations of S128A, L153P, K324I, F333N, 310_320delinsFLVFGVTYDGSTPVP (SEQ ID NO: 940), 91_100delinsGGGGGKSVDSDGDSYGGGGG (SEQ ID NO: 943), wherein the positions correspond to SEQ ID NO: 1, and provided that the amino acid sequence comprises a cysteine (C) at a position in the polypeptide that corresponds to position 125 of SEQ ID NO: 1, a histidine (H) at a position in the polypeptide that corresponds to position 283 of SEQ ID NO: 1, an aspartic acid (D) at a position in the polypeptide that corresponds to position 305 of SEQ ID NO: 1, an aspartic acid (D) at a position in the polypeptide that corresponds to position 307 of SEQ ID NO: 1, and/or a lysine (K) at a position in the polypeptide that corresponds to position 115 of SEQ ID NO: 1. In some embodiments, the polypeptide having protease activity comprises an amino acid sequence having at least 50%, at least 60%, at least 70%, at least 80%, at least 81%, at least 82%, at least 83%, at least 84%, at least 85%, at least 86%, at least 87%, at least 88%, at least 89%, at least 90%, at least 91%, at least 92%, at least 93%, at least 94%, at least 95%, at least 96%, at least 97%, at least 98%, or at least 99% sequence identity to SEQ ID NO: 1, provided that the amino acid sequence comprises mutations of S128A, L153P, K324I, F333N, 310_320delinsFLVFGVTYDGSTPVP (SEQ ID NO: 940), 271_287delinsVGISGSAGGIKSVDSDGDSYI (SEQ ID NO: 932), wherein the positions correspond to SEQ ID NO: 1, and provided that the amino acid sequence comprises a cysteine (C) at a position in the polypeptide that corresponds to position 125 of SEQ ID NO: 1, a histidine (H) at a position in the polypeptide that corresponds to position 283 of SEQ ID NO: 1, an aspartic acid (D) at a position in the polypeptide that corresponds to position 305 of SEQ ID NO: 1, an aspartic acid (D) at a position in the polypeptide that corresponds to position 307 of SEQ ID NO: 1, and/or a lysine (K) at a position in the polypeptide that corresponds to position 115 of SEQ ID NO: 1. In some embodiments, the polypeptide having protease activity comprises an amino acid sequence having at least 50%, at least 60%, at least 70%, at least 80%, at least 81%, at least 82%, at least 83%, at least 84%, at least 85%, at least 86%, at least 87%, at least 88%, at least 89%, at least 90%, at least 91%, at least 92%, at least 93%, at least 94%, at least 95%, at least 96%, at least 97%, at least 98%, or at least 99% sequence identity to SEQ ID NO: 1, provided that the amino acid sequence comprises mutations of $128A, L153P, K324I, F333N, 307_322delinsLAKGNNYFGHWHFAVM (SEQ ID NO: 936), 91_100delinsGGGGGKSVDSDGDSYGGGGG (SEQ ID NO: 943), wherein the positions correspond to SEQ ID NO: 1, and provided that the amino acid sequence comprises a cysteine (C) at a position in the polypeptide that corresponds to position 125 of SEQ ID NO: 1, a histidine (H) at a position in the polypeptide that corresponds to position 283 of SEQ ID NO: 1, an aspartic acid (D) at a position in the polypeptide that corresponds to position 305 of SEQ ID NO: 1, an aspartic acid (D) at a position in the polypeptide that corresponds to position 307 of SEQ ID NO: 1, and/or a lysine (K) at a position in the polypeptide that corresponds to position 115 of SEQ ID NO: 1. In some embodiments, the polypeptide having protease activity comprises an amino acid sequence having at least 50%, at least 60%, at least 70%, at least 80%, at least 81%, at least 82%, at least 83%, at least 84%, at least 85%, at least 86%, at least 87%, at least 88%, at least 89%, at least 90%, at least 91%, at least 92%, at least 93%, at least 94%, at least 95%, at least 96%, at least 97%, at least 98%, or at least 99% sequence identity to SEQ ID NO: 1, provided that the amino acid sequence comprises mutations of S128A, L153P, K324I, F333N, 307_322delinsLAKGNNYFGHWHFAVM (SEQ ID NO: 936), 271_287delinsVGISGSAGGIKSVDSDGDSYI (SEQ ID NO: 932), wherein the positions correspond to SEQ ID NO: 1, and provided that the amino acid sequence comprises a cysteine (C) at a position in the polypeptide that corresponds to position 125 of SEQ ID NO: 1, a histidine (H) at a position in the polypeptide that corresponds to position 283 of SEQ ID NO: 1, an aspartic acid (D) at a position in the polypeptide that corresponds to position 305 of SEQ ID NO: 1, an aspartic acid (D) at a position in the polypeptide that corresponds to position 307 of SEQ ID NO: 1, and/or a lysine (K) at a position in the polypeptide that corresponds to position 115 of SEQ ID NO: 1. In some embodiments, the polypeptide having protease activity comprises an amino acid sequence having at least 50%, at least 60%, at least 70%, at least 80%, at least 81%, at least 82%, at least 83%, at least 84%, at least 85%, at least 86%, at least 87%, at least 88%, at least 89%, at least 90%, at least 91%, at least 92%, at least 93%, at least 94%, at least 95%, at least 96%, at least 97%, at least 98%, or at least 99% sequence identity to SEQ ID NO: 1, provided that the amino acid sequence comprises mutations of S128A, L153P, K324I, F333N, 308_324delinsTKSVDSDGDSYKINY (SEQ ID NO: 932), 86_105delinsDDMEAKGNNYFGHWHFAVATN (SEQ ID NO: 941), wherein the positions correspond to SEQ ID NO: 1, and provided that the amino acid sequence comprises a cysteine (C) at a position in the polypeptide that corresponds to position 125 of SEQ ID NO: 1, a histidine (H) at a position in the polypeptide that corresponds to position 283 of SEQ ID NO: 1, an aspartic acid (D) at a position in the polypeptide that corresponds to position 305 of SEQ ID NO: 1, an aspartic acid (D) at a position in the polypeptide that corresponds to position 307 of SEQ ID NO: 1, and/or a lysine (K) at a position in the polypeptide that corresponds to position 115 of SEQ ID NO: 1. In some embodiments, the polypeptide having protease activity comprises an amino acid sequence having at least 50%, at least 60%, at least 70%, at least 80%, at least 81%, at least 82%, at least 83%, at least 84%, at least 85%, at least 86%, at least 87%, at least 88%, at least 89%, at least 90%, at least 91%, at least 92%, at least 93%, at least 94%, at least 95%, at least 96%, at least 97%, at least 98%, or at least 99% sequence identity to SEQ ID NO: 1, provided that the amino acid sequence comprises mutations of M117E, S128A, L153P, F333N, wherein the positions correspond to SEQ ID NO: 1, and provided that the amino acid sequence comprises a cysteine (C) at a position in the polypeptide that corresponds to position 125 of SEQ ID NO: 1, a histidine (H) at a position in the polypeptide that corresponds to position 283 of SEQ ID NO: 1, an aspartic acid (D) at a position in the polypeptide that corresponds to position 305 of SEQ ID NO: 1, an aspartic acid (D) at a position in the polypeptide that corresponds to position 307 of SEQ ID NO: 1, and/or a lysine (K) at a position in the polypeptide that corresponds to position 115 of SEQ ID NO: 1. In some embodiments, the polypeptide having protease activity comprises an amino acid sequence having at least 50%, at least 60%, at least 70%, at least 80%, at least 81%, at least 82%, at least 83%, at least 84%, at least 85%, at least 86%, at least 87%, at least 88%, at least 89%, at least 90%, at least 91%, at least 92%, at least 93%, at least 94%, at least 95%, at least 96%, at least 97%, at least 98%, or at least 99% sequence identity to SEQ ID NO: 1, provided that the amino acid sequence comprises mutations of M117F, S128A, L153P, F333N, wherein the positions correspond to SEQ ID NO: 1, and provided that the amino acid sequence comprises a cysteine (C) at a position in the polypeptide that corresponds to position 125 of SEQ ID NO: 1, a histidine (H) at a position in the polypeptide that corresponds to position 283 of SEQ ID NO: 1, an aspartic acid (D) at a position in the polypeptide that corresponds to position 305 of SEQ ID NO: 1, an aspartic acid (D) at a position in the polypeptide that corresponds to position 307 of SEQ ID NO: 1, and/or a lysine (K) at a position in the polypeptide that corresponds to position 115 of SEQ ID NO: 1. In some embodiments, the polypeptide having protease activity comprises an amino acid sequence having at least 50%, at least 60%, at least 70%, at least 80%, at least 81%, at least 82%, at least 83%, at least 84%, at least 85%, at least 86%, at least 87%, at least 88%, at least 89%, at least 90%, at least 91%, at least 92%, at least 93%, at least 94%, at least 95%, at least 96%, at least 97%, at least 98%, or at least 99% sequence identity to SEQ ID NO: 1, provided that the amino acid sequence comprises mutations of S128A, L153P, F333N, E348R, wherein the positions correspond to SEQ ID NO: 1, and provided that the amino acid sequence comprises a cysteine (C) at a position in the polypeptide that corresponds to position 125 of SEQ ID NO: 1, a histidine (H) at a position in the polypeptide that corresponds to position 283 of SEQ ID NO: 1, an aspartic acid (D) at a position in the polypeptide that corresponds to position 305 of SEQ ID NO: 1, an aspartic acid (D) at a position in the polypeptide that corresponds to position 307 of SEQ ID NO: 1, and/or a lysine (K) at a position in the polypeptide that corresponds to position 115 of SEQ ID NO: 1. In some embodiments, the polypeptide having protease activity comprises an amino acid sequence having at least 50%, at least 60%, at least 70%, at least 80%, at least 81%, at least 82%, at least 83%, at least 84%, at least 85%, at least 86%, at least 87%, at least 88%, at least 89%, at least 90%, at least 91%, at least 92%, at least 93%, at least 94%, at least 95%, at least 96%, at least 97%, at least 98%, or at least 99% sequence identity to SEQ ID NO: 1, provided that the amino acid sequence comprises mutations of S128A, L153P, F333N, E347R, wherein the positions correspond to SEQ ID NO: 1, and provided that the amino acid sequence comprises a cysteine (C) at a position in the polypeptide that corresponds to position 125 of SEQ ID NO: 1, a histidine (H) at a position in the polypeptide that corresponds to position 283 of SEQ ID NO: 1, an aspartic acid (D) at a position in the polypeptide that corresponds to position 305 of SEQ ID NO: 1, an aspartic acid (D) at a position in the polypeptide that corresponds to position 307 of SEQ ID NO: 1, and/or a lysine (K) at a position in the polypeptide that corresponds to position 115 of SEQ ID NO: 1. In some embodiments, the polypeptide having protease activity comprises an amino acid sequence having at least 50%, at least 60%, at least 70%, at least 80%, at least 81%, at least 82%, at least 83%, at least 84%, at least 85%, at least 86%, at least 87%, at least 88%, at least 89%, at least 90%, at least 91%, at least 92%, at least 93%, at least 94%, at least 95%, at least 96%, at least 97%, at least 98%, or at least 99% sequence identity to SEQ ID NO: 1, provided that the amino acid sequence comprises mutations of S128A, L153P, F333N, 1351R, wherein the positions correspond to SEQ ID NO: 1, and provided that the amino acid sequence comprises a cysteine (C) at a position in the polypeptide that corresponds to position 125 of SEQ ID NO: 1, a histidine (H) at a position in the polypeptide that corresponds to position 283 of SEQ ID NO: 1, an aspartic acid (D) at a position in the polypeptide that corresponds to position 305 of SEQ ID NO: 1, an aspartic acid (D) at a position in the polypeptide that corresponds to position 307 of SEQ ID NO: 1, and/or a lysine (K) at a position in the polypeptide that corresponds to position 115 of SEQ ID NO: 1. In some embodiments, the polypeptide having protease activity comprises an amino acid sequence having at least 50%, at least 60%, at least 70%, at least 80%, at least 81%, at least 82%, at least 83%, at least 84%, at least 85%, at least 86%, at least 87%, at least 88%, at least 89%, at least 90%, at least 91%, at least 92%, at least 93%, at least 94%, at least 95%, at least 96%, at least 97%, at least 98%, or at least 99% sequence identity to SEQ ID NO: 1, provided that the amino acid sequence comprises mutations of S128A, L153P, S220Y, F333N, wherein the positions correspond to SEQ ID NO: 1, and provided that the amino acid sequence comprises a cysteine (C) at a position in the polypeptide that corresponds to position 125 of SEQ ID NO: 1, a histidine (H) at a position in the polypeptide that corresponds to position 283 of SEQ ID NO: 1, an aspartic acid (D) at a position in the polypeptide that corresponds to position 305 of SEQ ID NO: 1, an aspartic acid (D) at a position in the polypeptide that corresponds to position 307 of SEQ ID NO: 1, and/or a lysine (K) at a position in the polypeptide that corresponds to position 115 of SEQ ID NO: 1. In some embodiments, the polypeptide having protease activity comprises an amino acid sequence having at least 50%, at least 60%, at least 70%, at least 80%, at least 81%, at least 82%, at least 83%, at least 84%, at least 85%, at least 86%, at least 87%, at least 88%, at least 89%, at least 90%, at least 91%, at least 92%, at least 93%, at least 94%, at least 95%, at least 96%, at least 97%, at least 98%, or at least 99% sequence identity to SEQ ID NO: 1, provided that the amino acid sequence comprises mutations of S128A, L153P, S221Y, F333N, wherein the positions correspond to SEQ ID NO: 1, and provided that the amino acid sequence comprises a cysteine (C) at a position in the polypeptide that corresponds to position 125 of SEQ ID NO: 1, a histidine (H) at a position in the polypeptide that corresponds to position 283 of SEQ ID NO: 1, an aspartic acid (D) at a position in the polypeptide that corresponds to position 305 of SEQ ID NO: 1, an aspartic acid (D) at a position in the polypeptide that corresponds to position 307 of SEQ ID NO: 1, and/or a lysine (K) at a position in the polypeptide that corresponds to position 115 of SEQ ID NO: 1. In some embodiments, the polypeptide having protease activity comprises an amino acid sequence having at least 50%, at least 60%, at least 70%, at least 80%, at least 81%, at least 82%, at least 83%, at least 84%, at least 85%, at least 86%, at least 87%, at least 88%, at least 89%, at least 90%, at least 91%, at least 92%, at least 93%, at least 94%, at least 95%, at least 96%, at least 97%, at least 98%, or at least 99% sequence identity to SEQ ID NO: 1, provided that the amino acid sequence comprises mutations of S128A, L153P, H275Y, F333N, wherein the positions correspond to SEQ ID NO: 1, and provided that the amino acid sequence comprises a cysteine (C) at a position in the polypeptide that corresponds to position 125 of SEQ ID NO: 1, a histidine (H) at a position in the polypeptide that corresponds to position 283 of SEQ ID NO: 1, an aspartic acid (D) at a position in the polypeptide that corresponds to position 305 of SEQ ID NO: 1, an aspartic acid (D) at a position in the polypeptide that corresponds to position 307 of SEQ ID NO: 1, and/or a lysine (K) at a position in the polypeptide that corresponds to position 115 of SEQ ID NO: 1. In some embodiments, the polypeptide having protease activity comprises an amino acid sequence having at least 50%, at least 60%, at least 70%, at least 80%, at least 81%, at least 82%, at least 83%, at least 84%, at least 85%, at least 86%, at least 87%, at least 88%, at least 89%, at least 90%, at least 91%, at least 92%, at least 93%, at least 94%, at least 95%, at least 96%, at least 97%, at least 98%, or at least 99% sequence identity to SEQ ID NO: 1, provided that the amino acid sequence comprises mutations of S128A, L153P, F333N, 200_202NKAdelinsPYLSTKHL (SEQ ID NO: 930), wherein the positions correspond to SEQ ID NO: 1, and provided that the amino acid sequence comprises a cysteine (C) at a position in the polypeptide that corresponds to position 125 of SEQ ID NO: 1, a histidine (H) at a position in the polypeptide that corresponds to position 283 of SEQ ID NO: 1, an aspartic acid (D) at a position in the polypeptide that corresponds to position 305 of SEQ ID NO: 1, an aspartic acid (D) at a position in the polypeptide that corresponds to position 307 of SEQ ID NO: 1, and/or a lysine (K) at a position in the polypeptide that corresponds to position 115 of SEQ ID NO: 1. In some embodiments, the polypeptide having protease activity comprises an amino acid sequence having at least 50%, at least 60%, at least 70%, at least 80%, at least 81%, at least 82%, at least 83%, at least 84%, at least 85%, at least 86%, at least 87%, at least 88%, at least 89%, at least 90%, at least 91%, at least 92%, at least 93%, at least 94%, at least 95%, at least 96%, at least 97%, at least 98%, or at least 99% sequence identity to SEQ ID NO: 1, provided that the amino acid sequence comprises mutations of M117E, S128A, L153P, H222E, F333N, E348R, wherein the positions correspond to SEQ ID NO: 1, and provided that the amino acid sequence comprises a cysteine (C) at a position in the polypeptide that corresponds to position 125 of SEQ ID NO: 1, a histidine (H) at a position in the polypeptide that corresponds to position 283 of SEQ ID NO: 1, an aspartic acid (D) at a position in the polypeptide that corresponds to position 305 of SEQ ID NO: 1, an aspartic acid (D) at a position in the polypeptide that corresponds to position 307 of SEQ ID NO: 1, and/or a lysine (K) at a position in the polypeptide that corresponds to position 115 of SEQ ID NO: 1. In some embodiments, the polypeptide having protease activity comprises an amino acid sequence having at least 50%, at least 60%, at least 70%, at least 80%, at least 81%, at least 82%, at least 83%, at least 84%, at least 85%, at least 86%, at least 87%, at least 88%, at least 89%, at least 90%, at least 91%, at least 92%, at least 93%, at least 94%, at least 95%, at least 96%, at least 97%, at least 98%, or at least 99% sequence identity to SEQ ID NO: 1, provided that the amino acid sequence comprises mutations of C125S, S128A, L153P, K324I, F333N, wherein the positions correspond to SEQ ID NO: 1, and provided that the amino acid sequence comprises a cysteine (C) at a position in the polypeptide that corresponds to position 125 of SEQ ID NO: 1, a histidine (H) at a position in the polypeptide that corresponds to position 283 of SEQ ID NO: 1, an aspartic acid (D) at a position in the polypeptide that corresponds to position 305 of SEQ ID NO: 1, an aspartic acid (D) at a position in the polypeptide that corresponds to position 307 of SEQ ID NO: 1, and/or a lysine (K) at a position in the polypeptide that corresponds to position 115 of SEQ ID NO: 1. In some embodiments, the polypeptide having protease activity comprises an amino acid sequence having at least 50%, at least 60%, at least 70%, at least 80%, at least 81%, at least 82%, at least 83%, at least 84%, at least 85%, at least 86%, at least 87%, at least 88%, at least 89%, at least 90%, at least 91%, at least 92%, at least 93%, at least 94%, at least 95%, at least 96%, at least 97%, at least 98%, or at least 99% sequence identity to SEQ ID NO: 1, provided that the amino acid sequence comprises mutations of C125S, S128A, L153P, R280T, F333N, wherein the positions correspond to SEQ ID NO: 1, and provided that the amino acid sequence comprises a cysteine (C) at a position in the polypeptide that corresponds to position 125 of SEQ ID NO: 1, a histidine (H) at a position in the polypeptide that corresponds to position 283 of SEQ ID NO: 1, an aspartic acid (D) at a position in the polypeptide that corresponds to position 305 of SEQ ID NO: 1, an aspartic acid (D) at a position in the polypeptide that corresponds to position 307 of SEQ ID NO: 1, and/or a lysine (K) at a position in the polypeptide that corresponds to position 115 of SEQ ID NO: 1. In some embodiments, the polypeptide having protease activity comprises an amino acid sequence having at least 50%, at least 60%, at least 70%, at least 80%, at least 81%, at least 82%, at least 83%, at least 84%, at least 85%, at least 86%, at least 87%, at least 88%, at least 89%, at least 90%, at least 91%, at least 92%, at least 93%, at least 94%, at least 95%, at least 96%, at least 97%, at least 98%, or at least 99% sequence identity to SEQ ID NO: 1, provided that the amino acid sequence comprises mutations of C125S, S128A, L153P, N162E, K229E, F333N, wherein the positions correspond to SEQ ID NO: 1, and provided that the amino acid sequence comprises a cysteine (C) at a position in the polypeptide that corresponds to position 125 of SEQ ID NO: 1, a histidine (H) at a position in the polypeptide that corresponds to position 283 of SEQ ID NO: 1, an aspartic acid (D) at a position in the polypeptide that corresponds to position 305 of SEQ ID NO: 1, an aspartic acid (D) at a position in the polypeptide that corresponds to position 307 of SEQ ID NO: 1, and/or a lysine (K) at a position in the polypeptide that corresponds to position 115 of SEQ ID NO: 1. In some embodiments, the polypeptide having protease activity comprises an amino acid sequence having at least 50%, at least 60%, at least 70%, at least 80%, at least 81%, at least 82%, at least 83%, at least 84%, at least 85%, at least 86%, at least 87%, at least 88%, at least 89%, at least 90%, at least 91%, at least 92%, at least 93%, at least 94%, at least 95%, at least 96%, at least 97%, at least 98%, or at least 99% sequence identity to SEQ ID NO: 1, provided that the amino acid sequence comprises mutations of C125S, S128A, L153P, N162E, K229E, K324I, F333N, wherein the positions correspond to SEQ ID NO: 1, and provided that the amino acid sequence comprises a cysteine (C) at a position in the polypeptide that corresponds to position 125 of SEQ ID NO: 1, a histidine (H) at a position in the polypeptide that corresponds to position 283 of SEQ ID NO: 1, an aspartic acid (D) at a position in the polypeptide that corresponds to position 305 of SEQ ID NO: 1, an aspartic acid (D) at a position in the polypeptide that corresponds to position 307 of SEQ ID NO: 1, and/or a lysine (K) at a position in the polypeptide that corresponds to position 115 of SEQ ID NO: 1. In some embodiments, the polypeptide having protease activity comprises an amino acid sequence having at least 50%, at least 60%, at least 70%, at least 80%, at least 81%, at least 82%, at least 83%, at least 84%, at least 85%, at least 86%, at least 87%, at least 88%, at least 89%, at least 90%, at least 91%, at least 92%, at least 93%, at least 94%, at least 95%, at least 96%, at least 97%, at least 98%, or at least 99% sequence identity to SEQ ID NO: 1, provided that the amino acid sequence comprises mutations of C125S, S128A, L153P, N162E, K229E, R280T, K324I, F333N, wherein the positions correspond to SEQ ID NO: 1, and provided that the amino acid sequence comprises a cysteine (C) at a position in the polypeptide that corresponds to position 125 of SEQ ID NO: 1, a histidine (H) at a position in the polypeptide that corresponds to position 283 of SEQ ID NO: 1, an aspartic acid (D) at a position in the polypeptide that corresponds to position 305 of SEQ ID NO: 1, an aspartic acid (D) at a position in the polypeptide that corresponds to position 307 of SEQ ID NO: 1, and/or a lysine (K) at a position in the polypeptide that corresponds to position 115 of SEQ ID NO: 1. In some embodiments, the polypeptide having protease activity comprises an amino acid sequence having at least 50%, at least 60%, at least 70%, at least 80%, at least 81%, at least 82%, at least 83%, at least 84%, at least 85%, at least 86%, at least 87%, at least 88%, at least 89%, at least 90%, at least 91%, at least 92%, at least 93%, at least 94%, at least 95%, at least 96%, at least 97%, at least 98%, or at least 99% sequence identity to SEQ ID NO: 1, provided that the amino acid sequence comprises mutations of S128A, L153P, N162E, K229E, K324I, F333N, 177_183KEYQSNKdelinsESDHG (SEQ ID NOs: 920 and 921), wherein the positions correspond to SEQ ID NO: 1, and provided that the amino acid sequence comprises a cysteine (C) at a position in the polypeptide that corresponds to position 125 of SEQ ID NO: 1, a histidine (H) at a position in the polypeptide that corresponds to position 283 of SEQ ID NO: 1, an aspartic acid (D) at a position in the polypeptide that corresponds to position 305 of SEQ ID NO: 1, an aspartic acid (D) at a position in the polypeptide that corresponds to position 307 of SEQ ID NO: 1, and/or a lysine (K) at a position in the polypeptide that corresponds to position 115 of SEQ ID NO: 1. In some embodiments, the polypeptide having protease activity comprises an amino acid sequence having at least 50%, at least 60%, at least 70%, at least 80%, at least 81%, at least 82%, at least 83%, at least 84%, at least 85%, at least 86%, at least 87%, at least 88%, at least 89%, at least 90%, at least 91%, at least 92%, at least 93%, at least 94%, at least 95%, at least 96%, at least 97%, at least 98%, or at least 99% sequence identity to SEQ ID NO: 1, provided that the amino acid sequence comprises mutations of S128A, L153P, N162E, Q180H, K183D, K229E, K324I, F333N, 176_178YKEdelinsN, wherein the positions correspond to SEQ ID NO: 1, and provided that the amino acid sequence comprises a cysteine (C) at a position in the polypeptide that corresponds to position 125 of SEQ ID NO: 1, a histidine (H) at a position in the polypeptide that corresponds to position 283 of SEQ ID NO: 1, an aspartic acid (D) at a position in the polypeptide that corresponds to position 305 of SEQ ID NO: 1, an aspartic acid (D) at a position in the polypeptide that corresponds to position 307 of SEQ ID NO: 1, and/or a lysine (K) at a position in the polypeptide that corresponds to position 115 of SEQ ID NO: 1. In some embodiments, the polypeptide having protease activity comprises an amino acid sequence having at least 50%, at least 60%, at least 70%, at least 80%, at least 81%, at least 82%, at least 83%, at least 84%, at least 85%, at least 86%, at least 87%, at least 88%, at least 89%, at least 90%, at least 91%, at least 92%, at least 93%, at least 94%, at least 95%, at least 96%, at least 97%, at least 98%, or at least 99% sequence identity to SEQ ID NO: 1, provided that the amino acid sequence comprises mutations of S128A, L153P, N162E, K229E, F313T, S317N, K324I, F333N, 177_319KEYQSNKDRdelinsRDNRDN (SEQ ID NOs: 925 and 919), wherein the positions correspond to SEQ ID NO: 1, and provided that the amino acid sequence comprises a cysteine (C) at a position in the polypeptide that corresponds to position 125 of SEQ ID NO: 1, a histidine (H) at a position in the polypeptide that corresponds to position 283 of SEQ ID NO: 1, an aspartic acid (D) at a position in the polypeptide that corresponds to position 305 of SEQ ID NO: 1, an aspartic acid (D) at a position in the polypeptide that corresponds to position 307 of SEQ ID NO: 1, and/or a lysine (K) at a position in the polypeptide that corresponds to position 115 of SEQ ID NO: 1. In some embodiments, the polypeptide having protease activity comprises an amino acid sequence having at least 50%, at least 60%, at least 70%, at least 80%, at least 81%, at least 82%, at least 83%, at least 84%, at least 85%, at least 86%, at least 87%, at least 88%, at least 89%, at least 90%, at least 91%, at least 92%, at least 93%, at least 94%, at least 95%, at least 96%, at least 97%, at least 98%, or at least 99% sequence identity to SEQ ID NO: 1, provided that the amino acid sequence comprises mutations of S128A, L153P, N162E, K229E, K324I, F333N, 177_319KEYQSNKFNDNSKRdelinsRDNRDNIGDE (SEQ ID NOs: 926 and 927), wherein the positions correspond to SEQ ID NO: 1, and provided that the amino acid sequence comprises a cysteine (C) at a position in the polypeptide that corresponds to position 125 of SEQ ID NO: 1, a histidine (H) at a position in the polypeptide that corresponds to position 283 of SEQ ID NO: 1, an aspartic acid (D) at a position in the polypeptide that corresponds to position 305 of SEQ ID NO: 1, an aspartic acid (D) at a position in the polypeptide that corresponds to position 307 of SEQ ID NO: 1, and/or a lysine (K) at a position in the polypeptide that corresponds to position 115 of SEQ ID NO: 1. In some embodiments, the polypeptide having protease activity comprises an amino acid sequence having at least 50%, at least 60%, at least 70%, at least 80%, at least 81%, at least 82%, at least 83%, at least 84%, at least 85%, at least 86%, at least 87%, at least 88%, at least 89%, at least 90%, at least 91%, at least 92%, at least 93%, at least 94%, at least 95%, at least 96%, at least 97%, at least 98%, or at least 99% sequence identity to SEQ ID NO: 1, provided that the amino acid sequence comprises mutations of S128A, L153P, N162E, K229E, F313I, N314G, K324I, F333N, 177_318KEYQSNKNSKdelinsRDNRDN (SEQ ID NOs: 924 and 919), wherein the positions correspond to SEQ ID NO: 1, and provided that the amino acid sequence comprises a cysteine (C) at a position in the polypeptide that corresponds to position 125 of SEQ ID NO: 1, a histidine (H) at a position in the polypeptide that corresponds to position 283 of SEQ ID NO: 1, an aspartic acid (D) at a position in the polypeptide that corresponds to position 305 of SEQ ID NO: 1, an aspartic acid (D) at a position in the polypeptide that corresponds to position 307 of SEQ ID NO: 1, and/or a lysine (K) at a position in the polypeptide that corresponds to position 115 of SEQ ID NO: 1. In some embodiments, the polypeptide having protease activity comprises an amino acid sequence having at least 50%, at least 60%, at least 70%, at least 80%, at least 81%, at least 82%, at least 83%, at least 84%, at least 85%, at least 86%, at least 87%, at least 88%, at least 89%, at least 90%, at least 91%, at least 92%, at least 93%, at least 94%, at least 95%, at least 96%, at least 97%, at least 98%, or at least 99% sequence identity to SEQ ID NO: 1, provided that the amino acid sequence comprises mutations of S128A, L153P, N162E, K229E, D293G, Q294E, K297R, K324I, F333N, 177_183KEYQSNKdelinsRDNRDN (SEQ ID NOs: 920 and 919), wherein the positions correspond to SEQ ID NO: 1, and provided that the amino acid sequence comprises a cysteine (C) at a position in the polypeptide that corresponds to position 125 of SEQ ID NO: 1, a histidine (H) at a position in the polypeptide that corresponds to position 283 of SEQ ID NO: 1, an aspartic acid (D) at a position in the polypeptide that corresponds to position 305 of SEQ ID NO: 1, an aspartic acid (D) at a position in the polypeptide that corresponds to position 307 of SEQ ID NO: 1, and/or a lysine (K) at a position in the polypeptide that corresponds to position 115 of SEQ ID NO: 1. In some embodiments, the polypeptide having protease activity comprises an amino acid sequence having at least 50%, at least 60%, at least 70%, at least 80%, at least 81%, at least 82%, at least 83%, at least 84%, at least 85%, at least 86%, at least 87%, at least 88%, at least 89%, at least 90%, at least 91%, at least 92%, at least 93%, at least 94%, at least 95%, at least 96%, at least 97%, at least 98%, or at least 99% sequence identity to SEQ ID NO: 1, provided that the amino acid sequence comprises mutations of S128A, L153P, N162E, K229E, Q294E, D295K, K324I, F333N, 177_183KEYQSNKdelinsRDNRDN (SEQ ID NOs: 920 and 919), wherein the positions correspond to SEQ ID NO: 1, and provided that the amino acid sequence comprises a cysteine (C) at a position in the polypeptide that corresponds to position 125 of SEQ ID NO: 1, a histidine (H) at a position in the polypeptide that corresponds to position 283 of SEQ ID NO: 1, an aspartic acid (D) at a position in the polypeptide that corresponds to position 305 of SEQ ID NO: 1, an aspartic acid (D) at a position in the polypeptide that corresponds to position 307 of SEQ ID NO: 1, and/or a lysine (K) at a position in the polypeptide that corresponds to position 115 of SEQ ID NO: 1. In some embodiments, the polypeptide having protease activity comprises an amino acid sequence having at least 50%, at least 60%, at least 70%, at least 80%, at least 81%, at least 82%, at least 83%, at least 84%, at least 85%, at least 86%, at least 87%, at least 88%, at least 89%, at least 90%, at least 91%, at least 92%, at least 93%, at least 94%, at least 95%, at least 96%, at least 97%, at least 98%, or at least 99% sequence identity to SEQ ID NO: 1, provided that the amino acid sequence comprises mutations of S128A, L153P, N162E, K229E, Q294E, D295N, K297N, K324I, F333N, 177_183KEYQSNKdelinsRDNRDN (SEQ ID NOS: 920 and 919), wherein the positions correspond to SEQ ID NO: 1, and provided that the amino acid sequence comprises a cysteine (C) at a position in the polypeptide that corresponds to position 125 of SEQ ID NO: 1, a histidine (H) at a position in the polypeptide that corresponds to position 283 of SEQ ID NO: 1, an aspartic acid (D) at a position in the polypeptide that corresponds to position 305 of SEQ ID NO: 1, an aspartic acid (D) at a position in the polypeptide that corresponds to position 307 of SEQ ID NO: 1, and/or a lysine (K) at a position in the polypeptide that corresponds to position 115 of SEQ ID NO: 1. In some embodiments, the polypeptide having protease activity comprises an amino acid sequence having at least 50%, at least 60%, at least 70%, at least 80%, at least 81%, at least 82%, at least 83%, at least 84%, at least 85%, at least 86%, at least 87%, at least 88%, at least 89%, at least 90%, at least 91%, at least 92%, at least 93%, at least 94%, at least 95%, at least 96%, at least 97%, at least 98%, or at least 99% sequence identity to SEQ ID NO: 1, provided that the amino acid sequence comprises mutations of S128A, L153P, N162E, K229E, K324I, F333N, 177_185KEYQSNKYAdelinsESPNT (SEQ ID NOs: 922 and 923), wherein the positions correspond to SEQ ID NO: 1, and provided that the amino acid sequence comprises a cysteine (C) at a position in the polypeptide that corresponds to position 125 of SEQ ID NO: 1, a histidine (H) at a position in the polypeptide that corresponds to position 283 of SEQ ID NO: 1, an aspartic acid (D) at a position in the polypeptide that corresponds to position 305 of SEQ ID NO: 1, an aspartic acid (D) at a position in the polypeptide that corresponds to position 307 of SEQ ID NO: 1, and/or a lysine (K) at a position in the polypeptide that corresponds to position 115 of SEQ ID NO: 1. In some embodiments, the polypeptide having protease activity comprises an amino acid sequence having at least 50%, at least 60%, at least 70%, at least 80%, at least 81%, at least 82%, at least 83%, at least 84%, at least 85%, at least 86%, at least 87%, at least 88%, at least 89%, at least 90%, at least 91%, at least 92%, at least 93%, at least 94%, at least 95%, at least 96%, at least 97%, at least 98%, or at least 99% sequence identity to SEQ ID NO: 1, provided that the amino acid sequence comprises mutations of S128A, L153P, N162E, K229E, K324I, F333N, 180_185QSNKYAdelinsSG (SEQ ID NO: 929), wherein the positions correspond to SEQ ID NO: 1, and provided that the amino acid sequence comprises a cysteine (C) at a position in the polypeptide that corresponds to position 125 of SEQ ID NO: 1, a histidine (H) at a position in the polypeptide that corresponds to position 283 of SEQ ID NO: 1, an aspartic acid (D) at a position in the polypeptide that corresponds to position 305 of SEQ ID NO: 1, an aspartic acid (D) at a position in the polypeptide that corresponds to position 307 of SEQ ID NO: 1, and/or a lysine (K) at a position in the polypeptide that corresponds to position 115 of SEQ ID NO: 1. In some embodiments, the polypeptide having protease activity comprises an amino acid sequence having at least 50%, at least 60%, at least 70%, at least 80%, at least 81%, at least 82%, at least 83%, at least 84%, at least 85%, at least 86%, at least 87%, at least 88%, at least 89%, at least 90%, at least 91%, at least 92%, at least 93%, at least 94%, at least 95%, at least 96%, at least 97%, at least 98%, or at least 99% sequence identity to SEQ ID NO: 1, provided that the amino acid sequence comprises mutations of S128A, L153P, N162E, K229E, K318G, K324I, F333N, 177_317KEYQSNKNDNSdelinsRDNRDN (SEQ ID NOs: 928 and 919), wherein the positions correspond to SEQ ID NO: 1, and provided that the amino acid sequence comprises a cysteine (C) at a position in the polypeptide that corresponds to position 125 of SEQ ID NO: 1, a histidine (H) at a position in the polypeptide that corresponds to position 283 of SEQ ID NO: 1, an aspartic acid (D) at a position in the polypeptide that corresponds to position 305 of SEQ ID NO: 1, an aspartic acid (D) at a position in the polypeptide that corresponds to position 307 of SEQ ID NO: 1, and/or a lysine (K) at a position in the polypeptide that corresponds to position 115 of SEQ ID NO: 1. In some embodiments, the polypeptide having protease activity comprises an amino acid sequence having at least 50%, at least 60%, at least 70%, at least 80%, at least 81%, at least 82%, at least 83%, at least 84%, at least 85%, at least 86%, at least 87%, at least 88%, at least 89%, at least 90%, at least 91%, at least 92%, at least 93%, at least 94%, at least 95%, at least 96%, at least 97%, at least 98%, or at least 99% sequence identity to SEQ ID NO: 1, provided that the amino acid sequence comprises mutations of S128A, L153P, N162E, K229E, K324I, F333N, 177_317KEYQSNKNDNSdelinsRDNRDN (SEQ ID NOs: 928 and 919), wherein the positions correspond to SEQ ID NO: 1, and provided that the amino acid sequence comprises a cysteine (C) at a position in the polypeptide that corresponds to position 125 of SEQ ID NO: 1, a histidine (H) at a position in the polypeptide that corresponds to position 283 of SEQ ID NO: 1, an aspartic acid (D) at a position in the polypeptide that corresponds to position 305 of SEQ ID NO: 1, an aspartic acid (D) at a position in the polypeptide that corresponds to position 307 of SEQ ID NO: 1, and/or a lysine (K) at a position in the polypeptide that corresponds to position 115 of SEQ ID NO: 1. In some embodiments, the polypeptide having protease activity comprises an amino acid sequence having at least 50%, at least 60%, at least 70%, at least 80%, at least 81%, at least 82%, at least 83%, at least 84%, at least 85%, at least 86%, at least 87%, at least 88%, at least 89%, at least 90%, at least 91%, at least 92%, at least 93%, at least 94%, at least 95%, at least 96%, at least 97%, at least 98%, or at least 99% sequence identity to SEQ ID NO: 1, provided that the amino acid sequence comprises mutations of S128A, L153P, G199P, K324I, F333N, wherein the positions correspond to SEQ ID NO: 1, and provided that the amino acid sequence comprises a cysteine (C) at a position in the polypeptide that corresponds to position 125 of SEQ ID NO: 1, a histidine (H) at a position in the polypeptide that corresponds to position 283 of SEQ ID NO: 1, an aspartic acid (D) at a position in the polypeptide that corresponds to position 305 of SEQ ID NO: 1, an aspartic acid (D) at a position in the polypeptide that corresponds to position 307 of SEQ ID NO: 1, and/or a lysine (K) at a position in the polypeptide that corresponds to position 115 of SEQ ID NO: 1. In some embodiments, the polypeptide having protease activity comprises an amino acid sequence having at least 50%, at least 60%, at least 70%, at least 80%, at least 81%, at least 82%, at least 83%, at least 84%, at least 85%, at least 86%, at least 87%, at least 88%, at least 89%, at least 90%, at least 91%, at least 92%, at least 93%, at least 94%, at least 95%, at least 96%, at least 97%, at least 98%, or at least 99% sequence identity to SEQ ID NO: 1, provided that the amino acid sequence comprises mutations of S128A, L153P, H174E, K324I, F333N, wherein the positions correspond to SEQ ID NO: 1, and provided that the amino acid sequence comprises a cysteine (C) at a position in the polypeptide that corresponds to position 125 of SEQ ID NO: 1, a histidine (H) at a position in the polypeptide that corresponds to position 283 of SEQ ID NO: 1, an aspartic acid (D) at a position in the polypeptide that corresponds to position 305 of SEQ ID NO: 1, an aspartic acid (D) at a position in the polypeptide that corresponds to position 307 of SEQ ID NO: 1, and/or a lysine (K) at a position in the polypeptide that corresponds to position 115 of SEQ ID NO: 1. In some embodiments, the polypeptide having protease activity comprises an amino acid sequence having at least 50%, at least 60%, at least 70%, at least 80%, at least 81%, at least 82%, at least 83%, at least 84%, at least 85%, at least 86%, at least 87%, at least 88%, at least 89%, at least 90%, at least 91%, at least 92%, at least 93%, at least 94%, at least 95%, at least 96%, at least 97%, at least 98%, or at least 99% sequence identity to SEQ ID NO: 1, provided that the amino acid sequence comprises mutations of S128A, L153P, I262K, K324I, F333N, wherein the positions correspond to SEQ ID NO: 1, and provided that the amino acid sequence comprises a cysteine (C) at a position in the polypeptide that corresponds to position 125 of SEQ ID NO: 1, a histidine (H) at a position in the polypeptide that corresponds to position 283 of SEQ ID NO: 1, an aspartic acid (D) at a position in the polypeptide that corresponds to position 305 of SEQ ID NO: 1, an aspartic acid (D) at a position in the polypeptide that corresponds to position 307 of SEQ ID NO: 1, and/or a lysine (K) at a position in the polypeptide that corresponds to position 115 of SEQ ID NO: 1. In some embodiments, the polypeptide having protease activity comprises an amino acid sequence having at least 50%, at least 60%, at least 70%, at least 80%, at least 81%, at least 82%, at least 83%, at least 84%, at least 85%, at least 86%, at least 87%, at least 88%, at least 89%, at least 90%, at least 91%, at least 92%, at least 93%, at least 94%, at least 95%, at least 96%, at least 97%, at least 98%, or at least 99% sequence identity to SEQ ID NO: 1, provided that the amino acid sequence comprises mutations of S128A, L153P, K324I, F333N, 1336A, wherein the positions correspond to SEQ ID NO: 1, and provided that the amino acid sequence comprises a cysteine (C) at a position in the polypeptide that corresponds to position 125 of SEQ ID NO: 1, a histidine (H) at a position in the polypeptide that corresponds to position 283 of SEQ ID NO: 1, an aspartic acid (D) at a position in the polypeptide that corresponds to position 305 of SEQ ID NO: 1, an aspartic acid (D) at a position in the polypeptide that corresponds to position 307 of SEQ ID NO: 1, and/or a lysine (K) at a position in the polypeptide that corresponds to position 115 of SEQ ID NO: 1. In some embodiments, the polypeptide having protease activity comprises an amino acid sequence having at least 50%, at least 60%, at least 70%, at least 80%, at least 81%, at least 82%, at least 83%, at least 84%, at least 85%, at least 86%, at least 87%, at least 88%, at least 89%, at least 90%, at least 91%, at least 92%, at least 93%, at least 94%, at least 95%, at least 96%, at least 97%, at least 98%, or at least 99% sequence identity to SEQ ID NO: 1, provided that the amino acid sequence comprises mutations of K116D, S128A, L153P, K324I, F333N, wherein the positions correspond to SEQ ID NO: 1, and provided that the amino acid sequence comprises a cysteine (C) at a position in the polypeptide that corresponds to position 125 of SEQ ID NO: 1, a histidine (H) at a position in the polypeptide that corresponds to position 283 of SEQ ID NO: 1, an aspartic acid (D) at a position in the polypeptide that corresponds to position 305 of SEQ ID NO: 1, an aspartic acid (D) at a position in the polypeptide that corresponds to position 307 of SEQ ID NO: 1, and/or a lysine (K) at a position in the polypeptide that corresponds to position 115 of SEQ ID NO: 1. In some embodiments, the polypeptide having protease activity comprises an amino acid sequence having at least 50%, at least 60%, at least 70%, at least 80%, at least 81%, at least 82%, at least 83%, at least 84%, at least 85%, at least 86%, at least 87%, at least 88%, at least 89%, at least 90%, at least 91%, at least 92%, at least 93%, at least 94%, at least 95%, at least 96%, at least 97%, at least 98%, or at least 99% sequence identity to SEQ ID NO: 1, provided that the amino acid sequence comprises mutations of S128A, K149L, L153P, K324I, F333N, wherein the positions correspond to SEQ ID NO: 1, and provided that the amino acid sequence comprises a cysteine (C) at a position in the polypeptide that corresponds to position 125 of SEQ ID NO: 1, a histidine (H) at a position in the polypeptide that corresponds to position 283 of SEQ ID NO: 1, an aspartic acid (D) at a position in the polypeptide that corresponds to position 305 of SEQ ID NO: 1, an aspartic acid (D) at a position in the polypeptide that corresponds to position 307 of SEQ ID NO: 1, and/or a lysine (K) at a position in the polypeptide that corresponds to position 115 of SEQ ID NO: 1. In some embodiments, the polypeptide having protease activity comprises an amino acid sequence having at least 50%, at least 60%, at least 70%, at least 80%, at least 81%, at least 82%, at least 83%, at least 84%, at least 85%, at least 86%, at least 87%, at least 88%, at least 89%, at least 90%, at least 91%, at least 92%, at least 93%, at least 94%, at least 95%, at least 96%, at least 97%, at least 98%, or at least 99% sequence identity to SEQ ID NO: 1, provided that the amino acid sequence comprises mutations of S128A, L153P, N182D, K324I, F333N, wherein the positions correspond to SEQ ID NO: 1, and provided that the amino acid sequence comprises a cysteine aspartic acid (D) at a position in the polypeptide that corresponds to position 305 of SEQ ID NO: 1, an aspartic acid (D) at a position in the polypeptide that corresponds to position 307 of SEQ ID NO: 1, and/or a lysine (K) at a position in the polypeptide that corresponds to position 115 of SEQ ID NO: 1. In some embodiments, the polypeptide having protease activity comprises an amino acid sequence having at least 50%, at least 60%, at least 70%, at least 80%, at least 81%, at least 82%, at least 83%, at least 84%, at least 85%, at least 86%, at least 87%, at least 88%, at least 89%, at least 90%, at least 91%, at least 92%, at least 93%, at least 94%, at least 95%, at least 96%, at least 97%, at least 98%, or at least 99% sequence identity to SEQ ID NO: 1, provided that the amino acid sequence comprises mutations of S94E, S128A, L153P, K324I, F333N, wherein the positions correspond to SEQ ID NO: 1, and provided that the amino acid sequence comprises a cysteine (C) at a position in the polypeptide that corresponds to position 125 of SEQ ID NO: 1, a histidine (H) at a position in the polypeptide that corresponds to position 283 of SEQ ID NO: 1, an aspartic acid (D) at a position in the polypeptide that corresponds to position 305 of SEQ ID NO: 1, an aspartic acid (D) at a position in the polypeptide that corresponds to position 307 of SEQ ID NO: 1, and/or a lysine (K) at a position in the polypeptide that corresponds to position 115 of SEQ ID NO: 1. In some embodiments, the polypeptide having protease activity comprises an amino acid sequence having at least 50%, at least 60%, at least 70%, at least 80%, at least 81%, at least 82%, at least 83%, at least 84%, at least 85%, at least 86%, at least 87%, at least 88%, at least 89%, at least 90%, at least 91%, at least 92%, at least 93%, at least 94%, at least 95%, at least 96%, at least 97%, at least 98%, or at least 99% sequence identity to SEQ ID NO: 1, provided that the amino acid sequence comprises mutations of S128A, L153P, T276G, K324I, F333N, wherein the positions correspond to SEQ ID NO: 1, and provided that the amino acid sequence comprises a cysteine (C) at a position in the polypeptide that corresponds to position 125 of SEQ ID NO: 1, a histidine (H) at a position in the polypeptide that corresponds to position 283 of SEQ ID NO: 1, an aspartic acid (D) at a position in the polypeptide that corresponds to position 305 of SEQ ID NO: 1, an aspartic acid (D) at a position in the polypeptide that corresponds to position 307 of SEQ ID NO: 1, and/or a lysine (K) at a position in the polypeptide that corresponds to position 115 of SEQ ID NO: 1. In some embodiments, the polypeptide having protease activity comprises an amino acid sequence having at least 50%, at least 60%, at least 70%, at least 80%, at least 81%, at least 82%, at least 83%, at least 84%, at least 85%, at least 86%, at least 87%, at least 88%, at least 89%, at least 90%, at least 91%, at least 92%, at least 93%, at least 94%, at least 95%, at least 96%, at least 97%, at least 98%, or at least 99% sequence identity to SEQ ID NO: 1, provided that the amino acid sequence comprises mutations of S128A, L153P, V270P, K324I, F333N, wherein the positions correspond to SEQ ID NO: 1, and provided that the amino acid sequence comprises a cysteine (C) at a position in the polypeptide that corresponds to position 125 of SEQ ID NO: 1, a histidine (H) at a position in the polypeptide that corresponds to position 283 of SEQ ID NO: 1, an aspartic acid (D) at a position in the polypeptide that corresponds to position 305 of SEQ ID NO: 1, an aspartic acid (D) at a position in the polypeptide that corresponds to position 307 of SEQ ID NO: 1, and/or a lysine (K) at a position in the polypeptide that corresponds to position 115 of SEQ ID NO: 1. In some embodiments, the polypeptide having protease activity comprises an amino acid sequence having at least 50%, at least 60%, at least 70%, at least 80%, at least 81%, at least 82%, at least 83%, at least 84%, at least 85%, at least 86%, at least 87%, at least 88%, at least 89%, at least 90%, at least 91%, at least 92%, at least 93%, at least 94%, at least 95%, at least 96%, at least 97%, at least 98%, or at least 99% sequence identity to SEQ ID NO: 1, provided that the amino acid sequence comprises mutations of S128A, L153P, V274G, K324I, F333N, wherein the positions correspond to SEQ ID NO: 1, and provided that the amino acid sequence comprises a cysteine (C) at a position in the polypeptide that corresponds to position 125 of SEQ ID NO: 1, a histidine (H) at a position in the polypeptide that corresponds to position 283 of SEQ ID NO: 1, an aspartic acid (D) at a position in the polypeptide that corresponds to position 305 of SEQ ID NO: 1, an aspartic acid (D) at a position in the polypeptide that corresponds to position 307 of SEQ ID NO: 1, and/or a lysine (K) at a position in the polypeptide that corresponds to position 115 of SEQ ID NO: 1. In some embodiments, the polypeptide having protease activity comprises an amino acid sequence having at least 50%, at least 60%, at least 70%, at least 80%, at least 81%, at least 82%, at least 83%, at least 84%, at least 85%, at least 86%, at least 87%, at least 88%, at least 89%, at least 90%, at least 91%, at least 92%, at least 93%, at least 94%, at least 95%, at least 96%, at least 97%, at least 98%, or at least 99% sequence identity to SEQ ID NO: 1, provided that the amino acid sequence comprises mutations of S128A, L153P, V303I, K324I, F333N, wherein the positions correspond to SEQ ID NO: 1, and provided that the amino acid sequence comprises a cysteine (C) at a position in the polypeptide that corresponds to position 125 of SEQ ID NO: 1, a histidine (H) at a position in the polypeptide that corresponds to position 283 of SEQ ID NO: 1, an aspartic acid (D) at a position in the polypeptide that corresponds to position 305 of SEQ ID NO: 1, an aspartic acid (D) at a position in the polypeptide that corresponds to position 307 of SEQ ID NO: 1, and/or a lysine (K) at a position in the polypeptide that corresponds to position 115 of SEQ ID NO: 1. In some embodiments, the polypeptide having protease activity comprises an amino acid sequence having at least 50%, at least 60%, at least 70%, at least 80%, at least 81%, at least 82%, at least 83%, at least 84%, at least 85%, at least 86%, at least 87%, at least 88%, at least 89%, at least 90%, at least 91%, at least 92%, at least 93%, at least 94%, at least 95%, at least 96%, at least 97%, at least 98%, or at least 99% sequence identity to SEQ ID NO: 1, provided that the amino acid sequence comprises mutations of S128A, L153P, K324I, F333N, V364E, wherein the positions correspond to SEQ ID NO: 1, and provided that the amino acid sequence comprises a cysteine (C) at a position in the polypeptide that corresponds to position 125 of SEQ ID NO: 1, a histidine (H) at a position in the polypeptide that corresponds to position 283 of SEQ ID NO: 1, an aspartic acid (D) at a position in the polypeptide that corresponds to position 305 of SEQ ID NO: 1, an aspartic acid (D) at a position in the polypeptide that corresponds to position 307 of SEQ ID NO: 1, and/or a lysine (K) at a position in the polypeptide that corresponds to position 115 of SEQ ID NO: 1. In some embodiments, the polypeptide having protease activity comprises an amino acid sequence having at least 50%, at least 60%, at least 70%, at least 80%, at least 81%, at least 82%, at least 83%, at least 84%, at least 85%, at least 86%, at least 87%, at least 88%, at least 89%, at least 90%, at least 91%, at least 92%, at least 93%, at least 94%, at least 95%, at least 96%, at least 97%, at least 98%, or at least 99% sequence identity to SEQ ID NO: 1, provided that the amino acid sequence comprises mutations of S128A, L153P, Y224T, K324I, F333N, wherein the positions correspond to SEQ ID NO: 1, and provided that the amino acid sequence comprises a cysteine (C) at a position in the polypeptide that corresponds to position 125 of SEQ ID NO: 1, a histidine (H) at a position in the polypeptide that corresponds to position 283 of SEQ ID NO: 1, an aspartic acid (D) at a position in the polypeptide that corresponds to position 305 of SEQ ID NO: 1, an aspartic acid (D) at a position in the polypeptide that corresponds to position 307 of SEQ ID NO: 1, and/or a lysine (K) at a position in the polypeptide that corresponds to position 115 of SEQ ID NO: 1. In some embodiments, the polypeptide having protease activity comprises an amino acid sequence having at least 50%, at least 60%, at least 70%, at least 80%, at least 81%, at least 82%, at least 83%, at least 84%, at least 85%, at least 86%, at least 87%, at least 88%, at least 89%, at least 90%, at least 91%, at least 92%, at least 93%, at least 94%, at least 95%, at least 96%, at least 97%, at least 98%, or at least 99% sequence identity to SEQ ID NO: 1, provided that the amino acid sequence comprises mutations of S128A, L153P, Y281T, K324I, F333N, wherein the positions correspond to SEQ ID NO: 1, and provided that the amino acid sequence comprises a cysteine (C) at a position in the polypeptide that corresponds to position 125 of SEQ ID NO: 1, a histidine (H) at a position in the polypeptide that corresponds to position 283 of SEQ ID NO: 1, an aspartic acid (D) at a position in the polypeptide that corresponds to position 305 of SEQ ID NO: 1, an aspartic acid (D) at a position in the polypeptide that corresponds to position 307 of SEQ ID NO: 1, and/or a lysine (K) at a position in the polypeptide that corresponds to position 115 of SEQ ID NO: 1. In some embodiments, the polypeptide having protease activity comprises an amino acid sequence having at least 50%, at least 60%, at least 70%, at least 80%, at least 81%, at least 82%, at least 83%, at least 84%, at least 85%, at least 86%, at least 87%, at least 88%, at least 89%, at least 90%, at least 91%, at least 92%, at least 93%, at least 94%, at least 95%, at least 96%, at least 97%, at least 98%, or at least 99% sequence identity to SEQ ID NO: 1, provided that the amino acid sequence comprises mutations of 184P, S128A, L153P, K324I, F333N, wherein the positions correspond to SEQ ID NO: 1, and provided that the amino acid sequence comprises a cysteine (C) at a position in the polypeptide that corresponds to position 125 of SEQ ID NO: 1, a histidine (H) at a position in the polypeptide that corresponds to position 283 of SEQ ID NO: 1, an aspartic acid (D) at a position in the polypeptide that corresponds to position 305 of SEQ ID NO: 1, an aspartic acid (D) at a position in the polypeptide that corresponds to position 307 of SEQ ID NO: 1, and/or a lysine (K) at a position in the polypeptide that corresponds to position 115 of SEQ ID NO: 1. In some embodiments, the polypeptide having protease activity comprises an amino acid sequence having at least 50%, at least 60%, at least 70%, at least 80%, at least 81%, at least 82%, at least 83%, at least 84%, at least 85%, at least 86%, at least 87%, at least 88%, at least 89%, at least 90%, at least 91%, at least 92%, at least 93%, at least 94%, at least 95%, at least 96%, at least 97%, at least 98%, or at least 99% sequence identity to SEQ ID NO: 1, provided that the amino acid sequence comprises mutations of 184G, S128A, L153P, K324I, F333N, wherein the positions correspond to SEQ ID NO: 1, and provided that the amino acid sequence comprises a cysteine (C) at a position in the polypeptide that corresponds to position 125 of SEQ ID NO: 1, a histidine (H) at a position in the polypeptide that corresponds to position 283 of SEQ ID NO: 1, an aspartic acid (D) at a position in the polypeptide that corresponds to position 305 of SEQ ID NO: 1, an aspartic acid (D) at a position in the polypeptide that corresponds to position 307 of SEQ ID NO: 1, and/or a lysine (K) at a position in the polypeptide that corresponds to position 115 of SEQ ID NO: 1. In some embodiments, the polypeptide having protease activity comprises an amino acid sequence having at least 50%, at least 60%, at least 70%, at least 80%, at least 81%, at least 82%, at least 83%, at least 84%, at least 85%, at least 86%, at least 87%, at least 88%, at least 89%, at least 90%, at least 91%, at least 92%, at least 93%, at least 94%, at least 95%, at least 96%, at least 97%, at least 98%, or at least 99% sequence identity to SEQ ID NO: 1, provided that the amino acid sequence comprises mutations of V102L, S128A, L153P, K324I, F333N, wherein the positions correspond to SEQ ID NO: 1, and provided that the amino acid sequence comprises a cysteine (C) at a position in the polypeptide that corresponds to position 125 of SEQ ID NO: 1, a histidine (H) at a position in the polypeptide that corresponds to position 283 of SEQ ID NO: 1, an aspartic acid (D) at a position in the polypeptide that corresponds to position 305 of SEQ ID NO: 1, an aspartic acid (D) at a position in the polypeptide that corresponds to position 307 of SEQ ID NO: 1, and/or a lysine (K) at a position in the polypeptide that corresponds to position 115 of SEQ ID NO: 1. In some embodiments, the polypeptide having protease activity comprises an amino acid sequence having at least 50%, at least 60%, at least 70%, at least 80%, at least 81%, at least 82%, at least 83%, at least 84%, at least 85%, at least 86%, at least 87%, at least 88%, at least 89%, at least 90%, at least 91%, at least 92%, at least 93%, at least 94%, at least 95%, at least 96%, at least 97%, at least 98%, or at least 99% sequence identity to SEQ ID NO: 1, provided that the amino acid sequence comprises mutations of S128A, L153P, A185T, K324I, F333N, wherein the positions correspond to SEQ ID NO: 1, and provided that the amino acid sequence comprises a cysteine (C) at a position in the polypeptide that corresponds to position 125 of SEQ ID NO: 1, a histidine (H) at a position in the polypeptide that corresponds to position 283 of SEQ ID NO: 1, an aspartic acid (D) at a position in the polypeptide that corresponds to position 305 of SEQ ID NO: 1, an aspartic acid (D) at a position in the polypeptide that corresponds to position 307 of SEQ ID NO: 1, and/or a lysine (K) at a position in the polypeptide that corresponds to position 115 of SEQ ID NO: 1. In some embodiments, the polypeptide having protease activity comprises an amino acid sequence having at least 50%, at least 60%, at least 70%, at least 80%, at least 81%, at least 82%, at least 83%, at least 84%, at least 85%, at least 86%, at least 87%, at least 88%, at least 89%, at least 90%, at least 91%, at least 92%, at least 93%, at least 94%, at least 95%, at least 96%, at least 97%, at least 98%, or at least 99% sequence identity to SEQ ID NO: 1, provided that the amino acid sequence comprises mutations of S128A, L153P, N182P, K324I, F333N, wherein the positions correspond to SEQ ID NO: 1, and provided that the amino acid sequence comprises a cysteine (C) at a position in the polypeptide that corresponds to position 125 of SEQ ID NO: 1, a histidine (H) at a position in the polypeptide that corresponds to position 283 of SEQ ID NO: 1, an aspartic acid (D) at a position in the polypeptide that corresponds to position 305 of SEQ ID NO: 1, an aspartic acid (D) at a position in the polypeptide that corresponds to position 307 of SEQ ID NO: 1, and/or a lysine (K) at a position in the polypeptide that corresponds to position 115 of SEQ ID NO: 1. In some embodiments, the polypeptide having protease activity comprises an amino acid sequence having at least 50%, at least 60%, at least 70%, at least 80%, at least 81%, at least 82%, at least 83%, at least 84%, at least 85%, at least 86%, at least 87%, at least 88%, at least 89%, at least 90%, at least 91%, at least 92%, at least 93%, at least 94%, at least 95%, at least 96%, at least 97%, at least 98%, or at least 99% sequence identity to SEQ ID NO: 1, provided that the amino acid sequence comprises mutations of S128A, L153P, N242G, K324I, F333N, wherein the positions correspond to SEQ ID NO: 1, and provided that the amino acid sequence comprises a cysteine (C) at a position in the polypeptide that corresponds to position 125 of SEQ ID NO: 1, a histidine (H) at a position in the polypeptide that corresponds to position 283 of SEQ ID NO: 1, an aspartic acid (D) at a position in the polypeptide that corresponds to position 305 of SEQ ID NO: 1, an aspartic acid (D) at a position in the polypeptide that corresponds to position 307 of SEQ ID NO: 1, and/or a lysine (K) at a position in the polypeptide that corresponds to position 115 of SEQ ID NO: 1. In some embodiments, the polypeptide having protease activity comprises an amino acid sequence having at least 50%, at least 60%, at least 70%, at least 80%, at least 81%, at least 82%, at least 83%, at least 84%, at least 85%, at least 86%, at least 87%, at least 88%, at least 89%, at least 90%, at least 91%, at least 92%, at least 93%, at least 94%, at least 95%, at least 96%, at least 97%, at least 98%, or at least 99% sequence identity to SEQ ID NO: 1, provided that the amino acid sequence comprises mutations of S128A, L153P, 1301L, K324I, F333N, wherein the positions correspond to SEQ ID NO: 1, and provided that the amino acid sequence comprises a cysteine ID NO: 1, and/or a lysine (K) at a position in the polypeptide that corresponds to position 115 of SEQ ID NO: 1. In some embodiments, the polypeptide having protease activity comprises an amino acid sequence having at least 50%, at least 60%, at least 70%, at least 80%, at least 81%, at least 82%, at least 83%, at least 84%, at least 85%, at least 86%, at least 87%, at least 88%, at least 89%, at least 90%, at least 91%, at least 92%, at least 93%, at least 94%, at least 95%, at least 96%, at least 97%, at least 98%, or at least 99% sequence identity to SEQ ID NO: 1, provided that the amino acid sequence comprises mutations of S128A, L153P, V303Y, K324I, F333N, wherein the positions correspond to SEQ ID NO: 1, and provided that the amino acid sequence comprises a cysteine (C) at a position in the polypeptide that corresponds to position 125 of SEQ ID NO: 1, a histidine (H) at a position in the polypeptide that corresponds to position 283 of SEQ ID NO: 1, an aspartic acid (D) at a position in the polypeptide that corresponds to position 305 of SEQ ID NO: 1, an aspartic acid (D) at a position in the polypeptide that corresponds to position 307 of SEQ ID NO: 1, and/or a lysine (K) at a position in the polypeptide that corresponds to position 115 of SEQ ID NO: 1. In some embodiments, the polypeptide having protease activity comprises an amino acid sequence having at least 50%, at least 60%, at least 70%, at least 80%, at least 81%, at least 82%, at least 83%, at least 84%, at least 85%, at least 86%, at least 87%, at least 88%, at least 89%, at least 90%, at least 91%, at least 92%, at least 93%, at least 94%, at least 95%, at least 96%, at least 97%, at least 98%, or at least 99% sequence identity to SEQ ID NO: 1, provided that the amino acid sequence comprises mutations of S128A, L153P, E310D, K324I, F333N, wherein the positions correspond to SEQ ID NO: 1, and provided that the amino acid sequence comprises a cysteine (C) at a position in the polypeptide that corresponds to position 125 of SEQ ID NO: 1, a histidine (H) at a position in the polypeptide that corresponds to position 283 of SEQ ID NO: 1, an aspartic acid (D) at a position in the polypeptide that corresponds to position 305 of SEQ ID NO: 1, an aspartic acid (D) at a position in the polypeptide that corresponds to position 307 of SEQ ID NO: 1, and/or a lysine (K) at a position in the polypeptide that corresponds to position 115 of SEQ ID NO: 1. In some embodiments, the polypeptide having protease activity comprises an amino acid sequence having at least 50%, at least 60%, at least 70%, at least 80%, at least 81%, at least 82%, at least 83%, at least 84%, at least 85%, at least 86%, at least 87%, at least 88%, at least 89%, at least 90%, at least 91%, at least 92%, at least 93%, at least 94%, at least 95%, at least 96%, at least 97%, at least 98%, or at least 99% sequence identity to SEQ ID NO: 1, provided that the amino acid sequence comprises mutations of S128A, L153P, H174D, K324I, F333N, wherein the positions correspond to SEQ ID NO: 1, and provided that the amino acid sequence comprises a cysteine (C) at a position in the polypeptide that corresponds to position 125 of SEQ ID NO: 1, a histidine (H) at a position in the polypeptide that corresponds to position 283 of SEQ ID NO: 1, an aspartic acid (D) at a position in the polypeptide that corresponds to position 305 of SEQ ID NO: 1, an aspartic acid (D) at a position in the polypeptide that corresponds to position 307 of SEQ ID NO: 1, and/or a lysine (K) at a position in the polypeptide that corresponds to position 115 of SEQ ID NO: 1. In some embodiments, the polypeptide having protease activity comprises an amino acid sequence having at least 50%, at least 60%, at least 70%, at least 80%, at least 81%, at least 82%, at least 83%, at least 84%, at least 85%, at least 86%, at least 87%, at least 88%, at least 89%, at least 90%, at least 91%, at least 92%, at least 93%, at least 94%, at least 95%, at least 96%, at least 97%, at least 98%, or at least 99% sequence identity to SEQ ID NO: 1, provided that the amino acid sequence comprises mutations of S128A, L153P, N173K, K324I, F333N, wherein the positions correspond to SEQ ID NO: 1, and provided that the amino acid sequence comprises a cysteine (C) at a position in the polypeptide that corresponds to position 125 of SEQ ID NO: 1, a histidine (H) at a position in the polypeptide that corresponds to position 283 of SEQ ID NO: 1, an aspartic acid (D) at a position in the polypeptide that corresponds to position 305 of SEQ ID NO: 1, an aspartic acid (D) at a position in the polypeptide that corresponds to position 307 of SEQ ID NO: 1, and/or a lysine (K) at a position in the polypeptide that corresponds to position 115 of SEQ ID NO: 1. In some embodiments, the polypeptide having protease activity comprises an amino acid sequence having at least 50%, at least 60%, at least 70%, at least 80%, at least 81%, at least 82%, at least 83%, at least 84%, at least 85%, at least 86%, at least 87%, at least 88%, at least 89%, at least 90%, at least 91%, at least 92%, at least 93%, at least 94%, at least 95%, at least 96%, at least 97%, at least 98%, or at least 99% sequence identity to SEQ ID NO: 1, provided that the amino acid sequence comprises mutations of S128A, L153P, K196Q, K324I, F333N, wherein the positions correspond to SEQ ID NO: 1, and provided that the amino acid sequence comprises a cysteine (C) at a position in the polypeptide that corresponds to position 125 of SEQ ID NO: 1, a histidine (H) at a position in the polypeptide that corresponds to position 283 of SEQ ID NO: 1, an aspartic acid (D) at a position in the polypeptide that corresponds to position 305 of SEQ ID NO: 1, an aspartic acid (D) at a position in the polypeptide that corresponds to position 307 of SEQ ID NO: 1, and/or a lysine (K) at a position in the polypeptide that corresponds to position 115 of SEQ ID NO: 1. In some embodiments, the polypeptide having protease activity comprises an amino acid sequence having at least 50%, at least 60%, at least 70%, at least 80%, at least 81%, at least 82%, at least 83%, at least 84%, at least 85%, at least 86%, at least 87%, at least 88%, at least 89%, at least 90%, at least 91%, at least 92%, at least 93%, at least 94%, at least 95%, at least 96%, at least 97%, at least 98%, or at least 99% sequence identity to SEQ ID NO: 1, provided that the amino acid sequence comprises mutations of S128A, L153P, K196L, K324I, F333N, wherein the positions correspond to SEQ ID NO: 1, and provided that the amino acid sequence comprises a cysteine (C) at a position in the polypeptide that corresponds to position 125 of SEQ ID NO: 1, a histidine (H) at a position in the polypeptide that corresponds to position 283 of SEQ ID NO: 1, an aspartic acid (D) at a position in the polypeptide that corresponds to position 305 of SEQ ID NO: 1, an aspartic acid (D) at a position in the polypeptide that corresponds to position 307 of SEQ ID NO: 1, and/or a lysine (K) at a position in the polypeptide that corresponds to position 115 of SEQ ID NO: 1. In some embodiments, the polypeptide having protease activity comprises an amino acid sequence having at least 50%, at least 60%, at least 70%, at least 80%, at least 81%, at least 82%, at least 83%, at least 84%, at least 85%, at least 86%, at least 87%, at least 88%, at least 89%, at least 90%, at least 91%, at least 92%, at least 93%, at least 94%, at least 95%, at least 96%, at least 97%, at least 98%, or at least 99% sequence identity to SEQ ID NO: 1, provided that the amino acid sequence comprises mutations of S128A, L153P, K195L, K324I, F333N, wherein the positions correspond to SEQ ID NO: 1, and provided that the amino acid sequence comprises a cysteine (C) at a position in the polypeptide that corresponds to position 125 of SEQ ID NO: 1, a histidine (H) at a position in the polypeptide that corresponds to position 283 of SEQ ID NO: 1, an aspartic acid (D) at a position in the polypeptide that corresponds to position 305 of SEQ ID NO: 1, an aspartic acid (D) at a position in the polypeptide that corresponds to position 307 of SEQ ID NO: 1, and/or a lysine (K) at a position in the polypeptide that corresponds to position 115 of SEQ ID NO: 1. In some embodiments, the polypeptide having protease activity comprises an amino acid sequence having at least 50%, at least 60%, at least 70%, at least 80%, at least 81%, at least 82%, at least 83%, at least 84%, at least 85%, at least 86%, at least 87%, at least 88%, at least 89%, at least 90%, at least 91%, at least 92%, at least 93%, at least 94%, at least 95%, at least 96%, at least 97%, at least 98%, or at least 99% sequence identity to SEQ ID NO: 1, provided that the amino acid sequence comprises mutations of S128A, L153P, K195R, K324I, F333N, wherein the positions correspond to SEQ ID NO: 1, and provided that the amino acid sequence comprises a cysteine (C) at a position in the polypeptide that corresponds to position 125 of SEQ ID NO: 1, a histidine (H) at a position in the polypeptide that corresponds to position 283 of SEQ ID NO: 1, an aspartic acid (D) at a position in the polypeptide that corresponds to position 305 of SEQ ID NO: 1, an aspartic acid (D) at a position in the polypeptide that corresponds to position 307 of SEQ ID NO: 1, and/or a lysine (K) at a position in the polypeptide that corresponds to position 115 of SEQ ID NO: 1. In some embodiments, the polypeptide having protease activity comprises an amino acid sequence having at least 50%, at least 60%, at least 70%, at least 80%, at least 81%, at least 82%, at least 83%, at least 84%, at least 85%, at least 86%, at least 87%, at least 88%, at least 89%, at least 90%, at least 91%, at least 92%, at least 93%, at least 94%, at least 95%, at least 96%, at least 97%, at least 98%, or at least 99% sequence identity to SEQ ID NO: 1, provided that the amino acid sequence comprises mutations of S128A, L153P, H197R, K324I, F333N, wherein the positions correspond to SEQ ID NO: 1, and provided that the amino acid sequence comprises a cysteine (C) at a position in the polypeptide that corresponds to position 125 of SEQ ID NO: 1, a histidine (H) at a position in the polypeptide that corresponds to position 283 of SEQ ID NO: 1, an aspartic acid (D) at a position in the polypeptide that corresponds to position 305 of SEQ ID NO: 1, an aspartic acid (D) at a position in the polypeptide that corresponds to position 307 of SEQ ID NO: 1, and/or a lysine (K) at a position in the polypeptide that corresponds to position 115 of SEQ ID NO: 1. In some embodiments, the polypeptide having protease activity comprises an amino acid sequence having at least 50%, at least 60%, at least 70%, at least 80%, at least 81%, at least 82%, at least 83%, at least 84%, at least 85%, at least 86%, at least 87%, at least 88%, at least 89%, at least 90%, at least 91%, at least 92%, at least 93%, at least 94%, at least 95%, at least 96%, at least 97%, at least 98%, or at least 99% sequence identity to SEQ ID NO: 1, provided that the amino acid sequence comprises mutations of S128A, L153P, H197K, K324I, F333N, wherein the positions correspond to SEQ ID NO: 1, and provided that the amino acid sequence comprises a cysteine (C) at a position in the polypeptide that corresponds to position 125 of SEQ ID NO: 1, a histidine (H) at a position in the polypeptide that corresponds to position 283 of SEQ ID NO: 1, an aspartic acid (D) at a position in the polypeptide that corresponds to position 305 of SEQ ID NO: 1, an aspartic acid (D) at a position in the polypeptide that corresponds to position 307 of SEQ ID NO: 1, and/or a lysine (K) at a position in the polypeptide that corresponds to position 115 of SEQ ID NO: 1. In some embodiments, the polypeptide having protease activity comprises an amino acid sequence having at least 50%, at least 60%, at least 70%, at least 80%, at least 81%, at least 82%, at least 83%, at least 84%, at least 85%, at least 86%, at least 87%, at least 88%, at least 89%, at least 90%, at least 91%, at least 92%, at least 93%, at least 94%, at least 95%, at least 96%, at least 97%, at least 98%, or at least 99% sequence identity to SEQ ID NO: 1, provided that the amino acid sequence comprises mutations of S128A, L153P, H197D, K324I, F333N, wherein the positions correspond to SEQ ID NO: 1, and provided that the amino acid sequence comprises a cysteine (C) at a position in the polypeptide that corresponds to position 125 of SEQ ID NO: 1, a histidine (H) at a position in the polypeptide that corresponds to position 283 of SEQ ID NO: 1, an aspartic acid (D) at a position in the polypeptide that corresponds to position 305 of SEQ ID NO: 1, an aspartic acid (D) at a position in the polypeptide that corresponds to position 307 of SEQ ID NO: 1, and/or a lysine (K) at a position in the polypeptide that corresponds to position 115 of SEQ ID NO: 1. In some embodiments, the polypeptide having protease activity comprises an amino acid sequence having at least 50%, at least 60%, at least 70%, at least 80%, at least 81%, at least 82%, at least 83%, at least 84%, at least 85%, at least 86%, at least 87%, at least 88%, at least 89%, at least 90%, at least 91%, at least 92%, at least 93%, at least 94%, at least 95%, at least 96%, at least 97%, at least 98%, or at least 99% sequence identity to SEQ ID NO: 1, provided that the amino acid sequence comprises mutations of S128A, L153P, N263D, K324I, F333N, wherein the positions correspond to SEQ ID NO: 1, and provided that the amino acid sequence comprises a cysteine (C) at a position in the polypeptide that corresponds to position 125 of SEQ ID NO: 1, a histidine (H) at a position in the polypeptide that corresponds to position 283 of SEQ ID NO: 1, an aspartic acid (D) at a position in the polypeptide that corresponds to position 305 of SEQ ID NO: 1, an aspartic acid (D) at a position in the polypeptide that corresponds to position 307 of SEQ ID NO: 1, and/or a lysine (K) at a position in the polypeptide that corresponds to position 115 of SEQ ID NO: 1. In some embodiments, the polypeptide having protease activity comprises an amino acid sequence having at least 50%, at least 60%, at least 70%, at least 80%, at least 81%, at least 82%, at least 83%, at least 84%, at least 85%, at least 86%, at least 87%, at least 88%, at least 89%, at least 90%, at least 91%, at least 92%, at least 93%, at least 94%, at least 95%, at least 96%, at least 97%, at least 98%, or at least 99% sequence identity to SEQ ID NO: 1, provided that the amino acid sequence comprises mutations of S128A, L153P, H268G, K324I, F333N, wherein the positions correspond to SEQ ID NO: 1, and provided that the amino acid sequence comprises a cysteine (C) at a position in the polypeptide that corresponds to position 125 of SEQ ID NO: 1, a histidine (H) at a position in the polypeptide that corresponds to position 283 of SEQ ID NO: 1, an aspartic acid (D) at a position in the polypeptide that corresponds to position 305 of SEQ ID NO: 1, an aspartic acid (D) at a position in the polypeptide that corresponds to position 307 of SEQ ID NO: 1, and/or a lysine (K) at a position in the polypeptide that corresponds to position 115 of SEQ ID NO: 1. In some embodiments, the polypeptide having protease activity comprises an amino acid sequence having at least 50%, at least 60%, at least 70%, at least 80%, at least 81%, at least 82%, at least 83%, at least 84%, at least 85%, at least 86%, at least 87%, at least 88%, at least 89%, at least 90%, at least 91%, at least 92%, at least 93%, at least 94%, at least 95%, at least 96%, at least 97%, at least 98%, or at least 99% sequence identity to SEQ ID NO: 1, provided that the amino acid sequence comprises mutations of S128A, L153P, H268R, K324I, F333N, wherein the positions correspond to SEQ ID NO: 1, and provided that the amino acid sequence comprises a cysteine (C) at a position in the polypeptide that corresponds to position 125 of SEQ ID NO: 1, a histidine (H) at a position in the polypeptide that corresponds to position 283 of SEQ ID NO: 1, an aspartic acid (D) at a position in the polypeptide that corresponds to position 305 of SEQ ID NO: 1, an aspartic acid (D) at a position in the polypeptide that corresponds to position 307 of SEQ ID NO: 1, and/or a lysine (K) at a position in the polypeptide that corresponds to position 115 of SEQ ID NO: 1. In some embodiments, the polypeptide having protease activity comprises an amino acid sequence having at least 50%, at least 60%, at least 70%, at least 80%, at least 81%, at least 82%, at least 83%, at least 84%, at least 85%, at least 86%, at least 87%, at least 88%, at least 89%, at least 90%, at least 91%, at least 92%, at least 93%, at least 94%, at least 95%, at least 96%, at least 97%, at least 98%, or at least 99% sequence identity to SEQ ID NO: 1, provided that the amino acid sequence comprises mutations of S128A, L153P, H268S, K324I, F333N, wherein the positions correspond to SEQ ID NO: 1, and provided that the amino acid sequence comprises a cysteine (C) at a position in the polypeptide that corresponds to position 125 of SEQ ID NO: 1, a histidine (H) at a position in the polypeptide that corresponds to position 283 of SEQ ID NO: 1, an aspartic acid (D) at a position in the polypeptide that corresponds to position 305 of SEQ ID NO: 1, an aspartic acid (D) at a position in the polypeptide that corresponds to position 307 of SEQ ID NO: 1, and/or a lysine (K) at a position in the polypeptide that corresponds to position 115 of SEQ ID NO: 1. In some embodiments, the polypeptide having protease activity comprises an amino acid sequence having at least 50%, at least 60%, at least 70%, at least 80%, at least 81%, at least 82%, at least 83%, at least 84%, at least 85%, at least 86%, at least 87%, at least 88%, at least 89%, at least 90%, at least 91%, at least 92%, at least 93%, at least 94%, at least 95%, at least 96%, at least 97%, at least 98%, or at least 99% sequence identity to SEQ ID NO: 1, provided that the amino acid sequence comprises mutations of S128A, L153P, T276R, K324I, F333N, wherein the positions correspond to SEQ ID NO: 1, and provided that the amino acid sequence comprises a cysteine (C) at a position in the polypeptide that corresponds to position 125 of SEQ ID NO: 1, a histidine (H) at a position in the polypeptide that corresponds to position 283 of SEQ ID NO: 1, an aspartic acid (D) at a position in the polypeptide that corresponds to position 305 of SEQ ID NO: 1, an aspartic acid (D) at a position in the polypeptide that corresponds to position 307 of SEQ ID NO: 1, and/or a lysine (K) at a position in the polypeptide that corresponds to position 115 of SEQ ID NO: 1. In some embodiments, the polypeptide having protease activity comprises an amino acid sequence having at least 50%, at least 60%, at least 70%, at least 80%, at least 81%, at least 82%, at least 83%, at least 84%, at least 85%, at least 86%, at least 87%, at least 88%, at least 89%, at least 90%, at least 91%, at least 92%, at least 93%, at least 94%, at least 95%, at least 96%, at least 97%, at least 98%, or at least 99% sequence identity to SEQ ID NO: 1, provided that the amino acid sequence comprises mutations of S128A, L153P, H275L, K324I, F333N, wherein the positions correspond to SEQ ID NO: 1, and provided that the amino acid sequence comprises a cysteine (C) at a position in the polypeptide that corresponds to position 125 of SEQ ID NO: 1, a histidine (H) at a position in the polypeptide that corresponds to position 283 of SEQ ID NO: 1, an aspartic acid (D) at a position in the polypeptide that corresponds to position 305 of SEQ ID NO: 1, an aspartic acid (D) at a position in the polypeptide that corresponds to position 307 of SEQ ID NO: 1, and/or a lysine (K) at a position in the polypeptide that corresponds to position 115 of SEQ ID NO: 1. In some embodiments, the polypeptide having protease activity comprises an amino acid sequence having at least 50%, at least 60%, at least 70%, at least 80%, at least 81%, at least 82%, at least 83%, at least 84%, at least 85%, at least 86%, at least 87%, at least 88%, at least 89%, at least 90%, at least 91%, at least 92%, at least 93%, at least 94%, at least 95%, at least 96%, at least 97%, at least 98%, or at least 99% sequence identity to SEQ ID NO: 1, provided that the amino acid sequence comprises mutations of S128A, L153P, L279G, K324I, F333N, wherein the positions correspond to SEQ ID NO: 1, and provided that the amino acid sequence comprises a cysteine (C) at a position in the polypeptide that corresponds to position 125 of SEQ ID NO: 1, a histidine (H) at a position in the polypeptide that corresponds to position 283 of SEQ ID NO: 1, an aspartic acid (D) at a position in the polypeptide that corresponds to position 305 of SEQ ID NO: 1, an aspartic acid (D) at a position in the polypeptide that corresponds to position 307 of SEQ ID NO: 1, and/or a lysine (K) at a position in the polypeptide that corresponds to position 115 of SEQ ID NO: 1. In some embodiments, the polypeptide having protease activity comprises an amino acid sequence having at least 50%, at least 60%, at least 70%, at least 80%, at least 81%, at least 82%, at least 83%, at least 84%, at least 85%, at least 86%, at least 87%, at least 88%, at least 89%, at least 90%, at least 91%, at least 92%, at least 93%, at least 94%, at least 95%, at least 96%, at least 97%, at least 98%, or at least 99% sequence identity to SEQ ID NO: 1, provided that the amino acid sequence comprises mutations of S128A, L153P, L279T, K324I, F333N, wherein the positions correspond to SEQ ID NO: 1, and provided that the amino acid sequence comprises a cysteine (C) at a position in the polypeptide that corresponds to position 125 of SEQ ID NO: 1, a histidine (H) at a position in the polypeptide that corresponds to position 283 of SEQ ID NO: 1, an aspartic acid (D) at a position in the polypeptide that corresponds to position 305 of SEQ ID NO: 1, an aspartic acid (D) at a position in the polypeptide that corresponds to position 307 of SEQ ID NO: 1, and/or a lysine (K) at a position in the polypeptide that corresponds to position 115 of SEQ ID NO: 1. In some embodiments, the polypeptide having protease activity comprises an amino acid sequence having at least 50%, at least 60%, at least 70%, at least 80%, at least 81%, at least 82%, at least 83%, at least 84%, at least 85%, at least 86%, at least 87%, at least 88%, at least 89%, at least 90%, at least 91%, at least 92%, at least 93%, at least 94%, at least 95%, at least 96%, at least 97%, at least 98%, or at least 99% sequence identity to SEQ ID NO: 1, provided that the amino acid sequence comprises mutations of S128A, L153P, Y281H, K324I, F333N, wherein the positions correspond to SEQ ID NO: 1, and provided that the amino acid sequence comprises a cysteine (C) at a position in the polypeptide that corresponds to position 125 of SEQ ID NO: 1, a histidine (H) at a position in the polypeptide that corresponds to position 283 of SEQ ID NO: 1, an aspartic acid (D) at a position in the polypeptide that corresponds to position 305 of SEQ ID NO: 1, an aspartic acid (D) at a position in the polypeptide that corresponds to position 307 of SEQ ID NO: 1, and/or a lysine (K) at a position in the polypeptide that corresponds to position 115 of SEQ ID NO: 1. In some embodiments, the polypeptide having protease activity comprises an amino acid sequence having at least 50%, at least 60%, at least 70%, at least 80%, at least 81%, at least 82%, at least 83%, at least 84%, at least 85%, at least 86%, at least 87%, at least 88%, at least 89%, at least 90%, at least 91%, at least 92%, at least 93%, at least 94%, at least 95%, at least 96%, at least 97%, at least 98%, or at least 99% sequence identity to SEQ ID NO: 1, provided that the amino acid sequence comprises mutations of S128A, L153P, Y281S, K324I, F333N, wherein the positions correspond to SEQ ID NO: 1, and provided that the amino acid sequence comprises a cysteine (C) at a position in the polypeptide that corresponds to position 125 of SEQ ID NO: 1, a histidine (H) at a position in the polypeptide that corresponds to position 283 of SEQ ID NO: 1, an aspartic acid (D) at a position in the polypeptide that corresponds to position 305 of SEQ ID NO: 1, an aspartic acid (D) at a position in the polypeptide that corresponds to position 307 of SEQ ID NO: 1, and/or a lysine (K) at a position in the polypeptide that corresponds to position 115 of SEQ ID NO: 1. In some embodiments, the polypeptide having protease activity comprises an amino acid sequence having at least 50%, at least 60%, at least 70%, at least 80%, at least 81%, at least 82%, at least 83%, at least 84%, at least 85%, at least 86%, at least 87%, at least 88%, at least 89%, at least 90%, at least 91%, at least 92%, at least 93%, at least 94%, at least 95%, at least 96%, at least 97%, at least 98%, or at least 99% sequence identity to SEQ ID NO: 1, provided that the amino acid sequence comprises mutations of S128A, L153P, R282G, K324I, F333N, wherein the positions correspond to SEQ ID NO: 1, and provided that the amino acid sequence comprises a cysteine (C) at a position in the polypeptide that corresponds to position 125 of SEQ ID NO: 1, a histidine (H) at a position in the polypeptide that corresponds to position 283 of SEQ ID NO: 1, an aspartic acid (D) at a position in the polypeptide that corresponds to position 305 of SEQ ID NO: 1, an aspartic acid (D) at a position in the polypeptide that corresponds to position 307 of SEQ ID NO: 1, and/or a lysine (K) at a position in the polypeptide that corresponds to position 115 of SEQ ID NO: 1. In some embodiments, the polypeptide having protease activity comprises an amino acid sequence having at least 50%, at least 60%, at least 70%, at least 80%, at least 81%, at least 82%, at least 83%, at least 84%, at least 85%, at least 86%, at least 87%, at least 88%, at least 89%, at least 90%, at least 91%, at least 92%, at least 93%, at least 94%, at least 95%, at least 96%, at least 97%, at least 98%, or at least 99% sequence identity to SEQ ID NO: 1, provided that the amino acid sequence comprises mutations of S128A, L153P, R282N, K324I, F333N, wherein the positions correspond to SEQ ID NO: 1, and provided that the amino acid sequence comprises a cysteine (C) at a position in the polypeptide that corresponds to position 125 of SEQ ID NO: 1, a histidine (H) at a position in the polypeptide that corresponds to position 283 of SEQ ID NO: 1, an aspartic acid (D) at a position in the polypeptide that corresponds to position 305 of SEQ ID NO: 1, an aspartic acid (D) at a position in the polypeptide that corresponds to position 307 of SEQ ID NO: 1, and/or a lysine (K) at a position in the polypeptide that corresponds to position 115 of SEQ ID NO: 1. In some embodiments, the polypeptide having protease activity comprises an amino acid sequence having at least 50%, at least 60%, at least 70%, at least 80%, at least 81%, at least 82%, at least 83%, at least 84%, at least 85%, at least 86%, at least 87%, at least 88%, at least 89%, at least 90%, at least 91%, at least 92%, at least 93%, at least 94%, at least 95%, at least 96%, at least 97%, at least 98%, or at least 99% sequence identity to SEQ ID NO: 1, provided that the amino acid sequence comprises mutations of S128A, L153P, K324I, F333D, wherein the positions correspond to SEQ ID NO: 1, and provided that the amino acid sequence comprises a cysteine (C) at a position in the polypeptide that corresponds to position 125 of SEQ ID NO: 1, a histidine (H) at a position in the polypeptide that corresponds to position 283 of SEQ ID NO: 1, an aspartic acid (D) at a position in the polypeptide that corresponds to position 305 of SEQ ID NO: 1, an aspartic acid (D) at a position in the polypeptide that corresponds to position 307 of SEQ ID NO: 1, and/or a lysine (K) at a position in the polypeptide that corresponds to position 115 of SEQ ID NO: 1. In some embodiments, the polypeptide having protease activity comprises an amino acid sequence having at least 50%, at least 60%, at least 70%, at least 80%, at least 81%, at least 82%, at least 83%, at least 84%, at least 85%, at least 86%, at least 87%, at least 88%, at least 89%, at least 90%, at least 91%, at least 92%, at least 93%, at least 94%, at least 95%, at least 96%, at least 97%, at least 98%, or at least 99% sequence identity to SEQ ID NO: 1, provided that the amino acid sequence comprises mutations of S128A, L153P, K324I, L329K, F333N, wherein the positions correspond to SEQ ID NO: 1, and provided that the amino acid sequence comprises a cysteine (C) at a position in the polypeptide that corresponds to position 125 of SEQ ID NO: 1, a histidine (H) at a position in the polypeptide that corresponds to position 283 of SEQ ID NO: 1, an aspartic acid (D) at a position in the polypeptide that corresponds to position 305 of SEQ ID NO: 1, an aspartic acid (D) at a position in the polypeptide that corresponds to position 307 of SEQ ID NO: 1, and/or a lysine (K) at a position in the polypeptide that corresponds to position 115 of SEQ ID NO: 1. In some embodiments, the polypeptide having protease activity comprises an amino acid sequence having at least 50%, at least 60%, at least 70%, at least 80%, at least 81%, at least 82%, at least 83%, at least 84%, at least 85%, at least 86%, at least 87%, at least 88%, at least 89%, at least 90%, at least 91%, at least 92%, at least 93%, at least 94%, at least 95%, at least 96%, at least 97%, at least 98%, or at least 99% sequence identity to SEQ ID NO: 1, provided that the amino acid sequence comprises mutations of S128A, L153P, K324I, L329R, F333N, wherein the positions correspond to SEQ ID NO: 1, and provided that the amino acid sequence comprises a cysteine (C) at a position in the polypeptide that corresponds to position 125 of SEQ ID NO: 1, a histidine (H) at a position in the polypeptide that corresponds to position 283 of SEQ ID NO: 1, an aspartic acid (D) at a position in the polypeptide that corresponds to position 305 of SEQ ID NO: 1, an aspartic acid (D) at a position in the polypeptide that corresponds to position 307 of SEQ ID NO: 1, and/or a lysine (K) at a position in the polypeptide that corresponds to position 115 of SEQ ID NO: 1. In some embodiments, the polypeptide having protease activity comprises an amino acid sequence having at least 50%, at least 60%, at least 70%, at least 80%, at least 81%, at least 82%, at least 83%, at least 84%, at least 85%, at least 86%, at least 87%, at least 88%, at least 89%, at least 90%, at least 91%, at least 92%, at least 93%, at least 94%, at least 95%, at least 96%, at least 97%, at least 98%, or at least 99% sequence identity to SEQ ID NO: 1, provided that the amino acid sequence comprises mutations of S128A, L153P, L279W, K324I, F333N, wherein the positions correspond to SEQ ID NO: 1, and provided that the amino acid sequence comprises a cysteine (C) at a position in the polypeptide that corresponds to position 125 of SEQ ID NO: 1, a histidine (H) at a position in the polypeptide that corresponds to position 283 of SEQ ID NO: 1, an aspartic acid (D) at a position in the polypeptide that corresponds to position 305 of SEQ ID NO: 1, an aspartic acid (D) at a position in the polypeptide that corresponds to position 307 of SEQ ID NO: 1, and/or a lysine (K) at a position in the polypeptide that corresponds to position 115 of SEQ ID NO: 1. In some embodiments, the polypeptide having protease activity comprises an amino acid sequence having at least 50%, at least 60%, at least 70%, at least 80%, at least 81%, at least 82%, at least 83%, at least 84%, at least 85%, at least 86%, at least 87%, at least 88%, at least 89%, at least 90%, at least 91%, at least 92%, at least 93%, at least 94%, at least 95%, at least 96%, at least 97%, at least 98%, or at least 99% sequence identity to SEQ ID NO: 1, provided that the amino acid sequence comprises mutations of S128A, L153P, L279Y, K324I, F333N, wherein the positions correspond to SEQ ID NO: 1, and provided that the amino acid sequence comprises a cysteine (C) at a position in the polypeptide that corresponds to position 125 of SEQ ID NO: 1, a histidine (H) at a position in the polypeptide that corresponds to position 283 of SEQ ID NO: 1, an aspartic acid (D) at a position in the polypeptide that corresponds to position 305 of SEQ ID NO: 1, an aspartic acid (D) at a position in the polypeptide that corresponds to position 307 of SEQ ID NO: 1, and/or a lysine (K) at a position in the polypeptide that corresponds to position 115 of SEQ ID NO: 1. In some embodiments, the polypeptide having protease activity comprises an amino acid sequence having at least 50%, at least 60%, at least 70%, at least 80%, at least 81%, at least 82%, at least 83%, at least 84%, at least 85%, at least 86%, at least 87%, at least 88%, at least 89%, at least 90%, at least 91%, at least 92%, at least 93%, at least 94%, at least 95%, at least 96%, at least 97%, at least 98%, or at least 99% sequence identity to SEQ ID NO: 1, provided that the amino acid sequence comprises mutations of D71E, S128A, L153P, R189K, K324I, A343Y, wherein the positions correspond to SEQ ID NO: 1, and provided that the amino acid sequence comprises a cysteine (C) at a position in the polypeptide that corresponds to position 125 of SEQ ID NO: 1, a histidine (H) at a position in the polypeptide that corresponds to position 283 of SEQ ID NO: 1, an aspartic acid (D) at a position in the polypeptide that corresponds to position 305 of SEQ ID NO: 1, an aspartic acid (D) at a position in the polypeptide that corresponds to position 307 of SEQ ID NO: 1, and/or a lysine (K) at a position in the polypeptide that corresponds to position 115 of SEQ ID NO: 1. In some embodiments, the polypeptide having protease activity comprises an amino acid sequence having at least 50%, at least 60%, at least 70%, at least 80%, at least 81%, at least 82%, at least 83%, at least 84%, at least 85%, at least 86%, at least 87%, at least 88%, at least 89%, at least 90%, at least 91%, at least 92%, at least 93%, at least 94%, at least 95%, at least 96%, at least 97%, at least 98%, or at least 99% sequence identity to SEQ ID NO: 1, provided that the amino acid sequence comprises mutations of D71E, S94D, S128A, E143D, L153P, R189K, Q294E, K324I, F333N, A343Y, wherein the positions correspond to SEQ ID NO: 1, and provided that the amino acid sequence comprises a cysteine (C) at a position in the polypeptide that corresponds to position 125 of SEQ ID NO: 1, a histidine (H) at a position in the polypeptide that corresponds to position 283 of SEQ ID NO: 1, an aspartic acid (D) at a position in the polypeptide that corresponds to position 305 of SEQ ID NO: 1, an aspartic acid (D) at a position in the polypeptide that corresponds to position 307 of SEQ ID NO: 1, and/or a lysine (K) at a position in the polypeptide that corresponds to position 115 of SEQ ID NO: 1. In some embodiments, the polypeptide having protease activity comprises an amino acid sequence having at least 50%, at least 60%, at least 70%, at least 80%, at least 81%, at least 82%, at least 83%, at least 84%, at least 85%, at least 86%, at least 87%, at least 88%, at least 89%, at least 90%, at least 91%, at least 92%, at least 93%, at least 94%, at least 95%, at least 96%, at least 97%, at least 98%, or at least 99% sequence identity to SEQ ID NO: 1, provided that the amino acid sequence comprises mutations of D71E, 184V, S94D, S128A, E143D, L153P, R189K, N242G, Q294E, K324I, F333N, A343Y, wherein the positions correspond to SEQ ID NO: 1, and provided that the amino acid sequence comprises a cysteine (C) at a position in the polypeptide that corresponds to position 125 of SEQ ID NO: 1, a histidine (H) at a position in the polypeptide that corresponds to position 283 of SEQ ID NO: 1, an aspartic acid (D) at a position in the polypeptide that corresponds to position 305 of SEQ ID NO: 1, an aspartic acid (D) at a position in the polypeptide that corresponds to position 307 of SEQ ID NO: 1, and/or a lysine (K) at a position in the polypeptide that corresponds to position 115 of SEQ ID NO: 1. In some embodiments, the polypeptide having protease activity comprises an amino acid sequence having at least 50%, at least 60%, at least 70%, at least 80%, at least 81%, at least 82%, at least 83%, at least 84%, at least 85%, at least 86%, at least 87%, at least 88%, at least 89%, at least 90%, at least 91%, at least 92%, at least 93%, at least 94%, at least 95%, at least 96%, at least 97%, at least 98%, or at least 99% sequence identity to SEQ ID NO: 1, provided that the amino acid sequence comprises mutations of D71E, 184V, E86D, H91K, S94D, S128A, E143D, L153P, S181D, R189K, N228K, N242G, N243K, K244L, G256D, Q294E, K324I, F333N, A343Y, wherein the positions correspond to SEQ ID NO: 1, and provided that the amino acid sequence comprises a cysteine (C) at a position in the polypeptide that corresponds to position 125 of SEQ ID NO: 1, a histidine (H) at a position in the polypeptide that corresponds to position 283 of SEQ ID NO: 1, an aspartic acid (D) at a position in the polypeptide that corresponds to position 305 of SEQ ID NO: 1, an aspartic acid (D) at a position in the polypeptide that corresponds to position 307 of SEQ ID NO: 1, and/or a lysine (K) at a position in the polypeptide that corresponds to position 115 of SEQ ID NO: 1. In some embodiments, the polypeptide having protease activity comprises an amino acid sequence having at least 50%, at least 60%, at least 70%, at least 80%, at least 81%, at least 82%, at least 83%, at least 84%, at least 85%, at least 86%, at least 87%, at least 88%, at least 89%, at least 90%, at least 91%, at least 92%, at least 93%, at least 94%, at least 95%, at least 96%, at least 97%, at least 98%, or at least 99% sequence identity to SEQ ID NO: 1, provided that the amino acid sequence comprises mutations of S128A, L153P, N260A, K324I, F333N, K346P, E347N, E374P, wherein the positions correspond to SEQ ID NO: 1, and provided that the amino acid sequence comprises a cysteine (C) at a position in the polypeptide that corresponds to position 125 of SEQ ID NO: 1, a histidine (H) at a position in the polypeptide that corresponds to position 283 of SEQ ID NO: 1, an aspartic acid (D) at a position in the polypeptide that corresponds to position 305 of SEQ ID NO: 1, an aspartic acid (D) at a position in the polypeptide that corresponds to position 307 of SEQ ID NO: 1, and/or a lysine (K) at a position in the polypeptide that corresponds to position 115 of SEQ ID NO: 1. In some embodiments, the polypeptide having protease activity comprises an amino acid sequence having at least 50%, at least 60%, at least 70%, at least 80%, at least 81%, at least 82%, at least 83%, at least 84%, at least 85%, at least 86%, at least 87%, at least 88%, at least 89%, at least 90%, at least 91%, at least 92%, at least 93%, at least 94%, at least 95%, at least 96%, at least 97%, at least 98%, or at least 99% sequence identity to SEQ ID NO: 1, provided that the amino acid sequence comprises mutations of S128A, L153P, V164K, N260A, K324I, F333N, K346P, E347N, E374P, wherein the positions correspond to SEQ ID NO: 1, and provided that the amino acid sequence comprises a cysteine (C) at a position in the polypeptide that corresponds to position 125 of SEQ ID NO: 1, a histidine (H) at a position in the polypeptide that corresponds to position 283 of SEQ ID NO: 1, an aspartic acid (D) at a position in the polypeptide that corresponds to position 305 of SEQ ID NO: 1, an aspartic acid (D) at a position in the polypeptide that corresponds to position 307 of SEQ ID NO: 1, and/or a lysine (K) at a position in the polypeptide that corresponds to position 115 of SEQ ID NO: 1. In some embodiments, the polypeptide having protease activity comprises an amino acid sequence having at least 50%, at least 60%, at least 70%, at least 80%, at least 81%, at least 82%, at least 83%, at least 84%, at least 85%, at least 86%, at least 87%, at least 88%, at least 89%, at least 90%, at least 91%, at least 92%, at least 93%, at least 94%, at least 95%, at least 96%, at least 97%, at least 98%, or at least 99% sequence identity to SEQ ID NO: 1, provided that the amino acid sequence comprises mutations of S128A, L153P, F175I, N260A, M323L, K324I, F333N, K346P, E347N, E374P, wherein the positions correspond to SEQ ID NO: 1, and provided that the amino acid sequence comprises a cysteine (C) at a position in the polypeptide that corresponds to position 125 of SEQ ID NO: 1, a histidine (H) at a position in the polypeptide that corresponds to position 283 of SEQ ID NO: 1, an aspartic acid (D) at a position in the polypeptide that corresponds to position 305 of SEQ ID NO: 1, an aspartic acid (D) at a position in the polypeptide that corresponds to position 307 of SEQ ID NO: 1, and/or a lysine (K) at a position in the polypeptide that corresponds to position 115 of SEQ ID NO: 1. In some embodiments, the polypeptide having protease activity comprises an amino acid sequence having at least 50%, at least 60%, at least 70%, at least 80%, at least 81%, at least 82%, at least 83%, at least 84%, at least 85%, at least 86%, at least 87%, at least 88%, at least 89%, at least 90%, at least 91%, at least 92%, at least 93%, at least 94%, at least 95%, at least 96%, at least 97%, at least 98%, or at least 99% sequence identity to SEQ ID NO: 1, provided that the amino acid sequence comprises mutations of S128A, R142K, L153P, N260A, K324I, F333N, K346P, E347N, wherein the positions correspond to SEQ ID NO: 1, and provided that the amino acid sequence comprises a cysteine (C) at a position in the polypeptide that corresponds to position 125 of SEQ ID NO: 1, a histidine (H) at a position in the polypeptide that corresponds to position 283 of SEQ ID NO: 1, an aspartic acid (D) at a position in the polypeptide that corresponds to position 305 of SEQ ID NO: 1, an aspartic acid (D) at a position in the polypeptide that corresponds to position 307 of SEQ ID NO: 1, and/or a lysine (K) at a position in the polypeptide that corresponds to position 115 of SEQ ID NO: 1. In some embodiments, the polypeptide having protease activity comprises an amino acid sequence having at least 50%, at least 60%, at least 70%, at least 80%, at least 81%, at least 82%, at least 83%, at least 84%, at least 85%, at least 86%, at least 87%, at least 88%, at least 89%, at least 90%, at least 91%, at least 92%, at least 93%, at least 94%, at least 95%, at least 96%, at least 97%, at least 98%, or at least 99% sequence identity to SEQ ID NO: 1, provided that the amino acid sequence comprises mutations of S128A, R142K, L153P, Q232E, N260A, K324I, F333N, R337L, K346P, E347N, wherein the positions correspond to SEQ ID NO: 1, and provided that the amino acid sequence comprises a cysteine (C) at a position in the polypeptide that corresponds to position 125 of SEQ ID NO: 1, a histidine (H) at a position in the polypeptide that corresponds to position 283 of SEQ ID NO: 1, an aspartic acid (D) at a position in the polypeptide that corresponds to position 305 of SEQ ID NO: 1, an aspartic acid (D) at a position in the polypeptide that corresponds to position 307 of SEQ ID NO: 1, and/or a lysine (K) at a position in the polypeptide that corresponds to position 115 of SEQ ID NO: 1. In some embodiments, the polypeptide having protease activity comprises an amino acid sequence having at least 50%, at least 60%, at least 70%, at least 80%, at least 81%, at least 82%, at least 83%, at least 84%, at least 85%, at least 86%, at least 87%, at least 88%, at least 89%, at least 90%, at least 91%, at least 92%, at least 93%, at least 94%, at least 95%, at least 96%, at least 97%, at least 98%, or at least 99% sequence identity to SEQ ID NO: 1, provided that the amino acid sequence comprises mutations of S128A, R142K, L153P, Y217W, N260A, K324I, F333N, R337L, K346P, E347N, wherein the positions correspond to SEQ ID NO: 1, and provided that the amino acid sequence comprises a cysteine (C) at a position in the polypeptide that corresponds to position 125 of SEQ ID NO: 1, a histidine (H) at a position in the polypeptide that corresponds to position 283 of SEQ ID NO: 1, an aspartic acid (D) at a position in the polypeptide that corresponds to position 305 of SEQ ID NO: 1, an aspartic acid (D) at a position in the polypeptide that corresponds to position 307 of SEQ ID NO: 1, and/or a lysine (K) at a position in the polypeptide that corresponds to position 115 of SEQ ID NO: 1. In some embodiments, the polypeptide having protease activity comprises an amino acid sequence having at least 50%, at least 60%, at least 70%, at least 80%, at least 81%, at least 82%, at least 83%, at least 84%, at least 85%, at least 86%, at least 87%, at least 88%, at least 89%, at least 90%, at least 91%, at least 92%, at least 93%, at least 94%, at least 95%, at least 96%, at least 97%, at least 98%, or at least 99% sequence identity to SEQ ID NO: 1, provided that the amino acid sequence comprises mutations of K115L, S128A, R142K, L153P, N260A, K324I, F333N, R337L, K346P, E347N, wherein the positions correspond to SEQ ID NO: 1, and provided that the amino acid sequence comprises a cysteine (C) at a position in the polypeptide that corresponds to position 125 of SEQ ID NO: 1, a histidine (H) at a position in the polypeptide that corresponds to position 283 of SEQ ID NO: 1, an aspartic acid (D) at a position in the polypeptide that corresponds to position 305 of SEQ ID NO: 1, an aspartic acid (D) at a position in the polypeptide that corresponds to position 307 of SEQ ID NO: 1, and/or a lysine (K) at a position in the polypeptide that corresponds to position 115 of SEQ ID NO: 1. In some embodiments, the polypeptide having protease activity comprises an amino acid sequence having at least 50%, at least 60%, at least 70%, at least 80%, at least 81%, at least 82%, at least 83%, at least 84%, at least 85%, at least 86%, at least 87%, at least 88%, at least 89%, at least 90%, at least 91%, at least 92%, at least 93%, at least 94%, at least 95%, at least 96%, at least 97%, at least 98%, or at least 99% sequence identity to SEQ ID NO: 1, provided that the amino acid sequence comprises mutations of S128A, R142K, F148Y, L153P, N182D, N260A, S286T, M323L, K324I, F333N, K346P, E347N, wherein the positions correspond to SEQ ID NO: 1, and provided that the amino acid sequence comprises a cysteine (C) at a position in the polypeptide that corresponds to position 125 of SEQ ID NO: 1, a histidine (H) at a position in the polypeptide that corresponds to position 283 of SEQ ID NO: 1, an aspartic acid (D) at a position in the polypeptide that corresponds to position 305 of SEQ ID NO: 1, an aspartic acid (D) at a position in the polypeptide that corresponds to position 307 of SEQ ID NO: 1, and/or a lysine (K) at a position in the polypeptide that corresponds to position 115 of SEQ ID NO: 1. In some embodiments, the polypeptide having protease activity comprises an amino acid sequence having at least 50%, at least 60%, at least 70%, at least 80%, at least 81%, at least 82%, at least 83%, at least 84%, at least 85%, at least 86%, at least 87%, at least 88%, at least 89%, at least 90%, at least 91%, at least 92%, at least 93%, at least 94%, at least 95%, at least 96%, at least 97%, at least 98%, or at least 99% sequence identity to SEQ ID NO: 1, provided that the amino acid sequence comprises mutations of S128A, L153P, N162E, H174E, N219G, K229E, N233G, H275Y, K324I, D332K, F333N, 177_183KEYQSNKdelinsRDNRDN (SEQ ID NOs: 920 and 919), wherein the positions correspond to SEQ ID NO: 1, and provided that the amino acid sequence comprises a cysteine (C) at a position in the polypeptide that corresponds to position 125 of SEQ ID NO: 1, a histidine (H) at a position in the polypeptide that corresponds to position 283 of SEQ ID NO: 1, an aspartic acid (D) at a position in the polypeptide that corresponds to position 305 of SEQ ID NO: 1, an aspartic acid (D) at a position in the polypeptide that corresponds to position 307 of SEQ ID NO: 1, and/or a lysine (K) at a position in the polypeptide that corresponds to position 115 of SEQ ID NO: 1. In some embodiments, the polypeptide having protease activity comprises an amino acid sequence having at least 50%, at least 60%, at least 70%, at least 80%, at least 81%, at least 82%, at least 83%, at least 84%, at least 85%, at least 86%, at least 87%, at least 88%, at least 89%, at least 90%, at least 91%, at least 92%, at least 93%, at least 94%, at least 95%, at least 96%, at least 97%, at least 98%, or at least 99% sequence identity to SEQ ID NO: 1, provided that the amino acid sequence comprises mutations of C125S, S128A, L153P, N162E, H174E, N219G, K229E, N233G, H275Y, K324I, D332K, F333N, 177_183KEYQSNKdelinsRDNRDN (SEQ ID NOs: 920 and 919), wherein the positions correspond to SEQ ID NO: 1, and provided that the amino acid sequence comprises a cysteine ID NO: 1, and/or a lysine (K) at a position in the polypeptide that corresponds to position 115 of SEQ ID NO: 1. In some embodiments, the polypeptide having protease activity comprises an amino acid sequence having at least 50%, at least 60%, at least 70%, at least 80%, at least 81%, at least 82%, at least 83%, at least 84%, at least 85%, at least 86%, at least 87%, at least 88%, at least 89%, at least 90%, at least 91%, at least 92%, at least 93%, at least 94%, at least 95%, at least 96%, at least 97%, at least 98%, or at least 99% sequence identity to SEQ ID NO: 1, provided that the amino acid sequence comprises mutations of T122S, S128A, L153P, N162E, H174E, N219G, K229E, N233G, H275Y, K324I, D332K, F333N, 177_183KEYQSNKdelinsRDNRDN (SEQ ID NOs: 920 and 919), wherein the positions correspond to SEQ ID NO: 1, and provided that the amino acid sequence comprises a cysteine (C) at a position in the polypeptide that corresponds to position 125 of SEQ ID NO: 1, a histidine (H) at a position in the polypeptide that corresponds to position 283 of SEQ ID NO: 1, an aspartic acid (D) at a position in the polypeptide that corresponds to position 305 of SEQ ID NO: 1, an aspartic acid (D) at a position in the polypeptide that corresponds to position 307 of SEQ ID NO: 1, and/or a lysine (K) at a position in the polypeptide that corresponds to position 115 of SEQ ID NO: 1. In some embodiments, the polypeptide having protease activity comprises an amino acid sequence having at least 50%, at least 60%, at least 70%, at least 80%, at least 81%, at least 82%, at least 83%, at least 84%, at least 85%, at least 86%, at least 87%, at least 88%, at least 89%, at least 90%, at least 91%, at least 92%, at least 93%, at least 94%, at least 95%, at least 96%, at least 97%, at least 98%, or at least 99% sequence identity to SEQ ID NO: 1, provided that the amino acid sequence comprises mutations of T122S, C125S, S128A, L153P, N162E, H174E, N219G, K229E, N233G, H275Y, K324I, D332K, F333N, 177_183KEYQSNKdelinsRDNRDN (SEQ ID NOs: 920 and 919), wherein the positions correspond to SEQ ID NO: 1, and provided that the amino acid sequence comprises a cysteine (C) at a position in the polypeptide that corresponds to position 125 of SEQ ID NO: 1, a histidine (H) at a position in the polypeptide that corresponds to position 283 of SEQ ID NO: 1, an aspartic acid (D) at a position in the polypeptide that corresponds to position 305 of SEQ ID NO: 1, an aspartic acid (D) at a position in the polypeptide that corresponds to position 307 of SEQ ID NO: 1, and/or a lysine (K) at a position in the polypeptide that corresponds to position 115 of SEQ ID NO: 1. In some embodiments, the polypeptide having protease activity comprises an amino acid sequence having at least 50%, at least 60%, at least 70%, at least 80%, at least 81%, at least 82%, at least 83%, at least 84%, at least 85%, at least 86%, at least 87%, at least 88%, at least 89%, at least 90%, at least 91%, at least 92%, at least 93%, at least 94%, at least 95%, at least 96%, at least 97%, at least 98%, or at least 99% sequence identity to SEQ ID NO: 1, provided that the amino acid sequence comprises mutations of S128A, L153P, N162E, H174E, N219G, K229E, H275Y, K324I, F333N, 177_183KEYQSNKdelinsRDNRDN (SEQ ID NOS: 920 and 919), wherein the positions correspond to SEQ ID NO: 1, and provided that the amino acid sequence comprises a cysteine (C) at a position in the polypeptide that corresponds to position 125 of SEQ ID NO: 1, a histidine (H) at a position in the polypeptide that corresponds to position 283 of SEQ ID NO: 1, an aspartic acid (D) at a position in the polypeptide that corresponds to position 305 of SEQ ID NO: 1, an aspartic acid (D) at a position in the polypeptide that corresponds to position 307 of SEQ ID NO: 1, and/or a lysine (K) at a position in the polypeptide that corresponds to position 115 of SEQ ID NO: 1. In some embodiments, the polypeptide having protease activity comprises an amino acid sequence having at least 50%, at least 60%, at least 70%, at least 80%, at least 81%, at least 82%, at least 83%, at least 84%, at least 85%, at least 86%, at least 87%, at least 88%, at least 89%, at least 90%, at least 91%, at least 92%, at least 93%, at least 94%, at least 95%, at least 96%, at least 97%, at least 98%, or at least 99% sequence identity to SEQ ID NO: 1, provided that the amino acid sequence comprises mutations of C125S, S128A, L153P, N162E, H174E, N219G, K229E, H275Y, K324I, F333N, 177_183KEYQSNKdelinsRDNRDN (SEQ ID NOs: 920 and 919), wherein the positions correspond to SEQ ID NO: 1, and provided that the amino acid sequence comprises a cysteine (C) at a position in the polypeptide that corresponds to position 125 of SEQ ID NO: 1, a histidine (H) at a position in the polypeptide that corresponds to position 283 of SEQ ID NO: 1, an aspartic acid (D) at a position in the polypeptide that corresponds to position 305 of SEQ ID NO: 1, an aspartic acid (D) at a position in the polypeptide that corresponds to position 307 of SEQ ID NO: 1, and/or a lysine (K) at a position in the polypeptide that corresponds to position 115 of SEQ ID NO: 1. In some embodiments, the polypeptide having protease activity comprises an amino acid sequence having at least 50%, at least 60%, at least 70%, at least 80%, at least 81%, at least 82%, at least 83%, at least 84%, at least 85%, at least 86%, at least 87%, at least 88%, at least 89%, at least 90%, at least 91%, at least 92%, at least 93%, at least 94%, at least 95%, at least 96%, at least 97%, at least 98%, or at least 99% sequence identity to SEQ ID NO: 1, provided that the amino acid sequence comprises mutations of T122S, S128A, L153P, N162E, H174E, N219G, K229E, H275Y, K324I, F333N, 177_183KEYQSNKdelinsRDNRDN (SEQ ID NOs: 920 and 919), wherein the positions correspond to SEQ ID NO: 1, and provided that the amino acid sequence comprises a cysteine (C) at a position in the polypeptide that corresponds to position 125 of SEQ ID NO: 1, a histidine (H) at a position in the polypeptide that corresponds to position 283 of SEQ ID NO: 1, an aspartic acid (D) at a position in the polypeptide that corresponds to position 305 of SEQ ID NO: 1, an aspartic acid (D) at a position in the polypeptide that corresponds to position 307 of SEQ ID NO: 1, and/or a lysine (K) at a position in the polypeptide that corresponds to position 115 of SEQ ID NO: 1. In some embodiments, the polypeptide having protease activity comprises an amino acid sequence having at least 50%, at least 60%, at least 70%, at least 80%, at least 81%, at least 82%, at least 83%, at least 84%, at least 85%, at least 86%, at least 87%, at least 88%, at least 89%, at least 90%, at least 91%, at least 92%, at least 93%, at least 94%, at least 95%, at least 96%, at least 97%, at least 98%, or at least 99% sequence identity to SEQ ID NO: 1, provided that the amino acid sequence comprises mutations of T122S, C125S, S128A, L153P, N162E, H174E, N219G, K229E, H275Y, K324I, F333N, 177_183KEYQSNKdelinsRDNRDN (SEQ ID NOs: 920 and 919), wherein the positions correspond to SEQ ID NO: 1, and provided that the amino acid sequence comprises a cysteine (C) at a position in the polypeptide that corresponds to position 125 of SEQ ID NO: 1, a histidine (H) at a position in the polypeptide that corresponds to position 283 of SEQ ID NO: 1, an aspartic acid (D) at a position in the polypeptide that corresponds to position 305 of SEQ ID NO: 1, an aspartic acid (D) at a position in the polypeptide that corresponds to position 307 of SEQ ID NO: 1, and/or a lysine (K) at a position in the polypeptide that corresponds to position 115 of SEQ ID NO: 1. In some embodiments, the polypeptide having protease activity comprises an amino acid sequence having at least 50%, at least 60%, at least 70%, at least 80%, at least 81%, at least 82%, at least 83%, at least 84%, at least 85%, at least 86%, at least 87%, at least 88%, at least 89%, at least 90%, at least 91%, at least 92%, at least 93%, at least 94%, at least 95%, at least 96%, at least 97%, at least 98%, or at least 99% sequence identity to SEQ ID NO: 1, provided that the amino acid sequence comprises mutations of S128A, L153P, K324I, F333N, 380insENNVADSNKNSEDVEVSSVEFDFLNFKYPKNEDQVSTEDMRLTLKDTNVENQPQ VKISFEEQNGNDWKEKDSGTFEEGKKYRLKIDVNKLALKIYGHLSKNKLNVIVNGKAV NIQNVVKKDSIETSFTIYSDSIDLEKINYWTDSENNWS (SEQ ID NO: 744), wherein the positions correspond to SEQ ID NO: 1, and provided that the amino acid sequence comprises a cysteine (C) at a position in the polypeptide that corresponds to position 125 of SEQ ID NO: 1, a histidine (H) at a position in the polypeptide that corresponds to position 283 of SEQ ID NO: 1, an aspartic acid (D) at a position in the polypeptide that corresponds to position 305 of SEQ ID NO: 1, an aspartic acid (D) at a position in the polypeptide that corresponds to position 307 of SEQ ID NO: 1, and/or a lysine (K) at a position in the polypeptide that corresponds to position 115 of SEQ ID NO: 1. In some embodiments, the polypeptide having protease activity comprises an amino acid sequence having at least 50%, at least 60%, at least 70%, at least 80%, at least 81%, at least 82%, at least 83%, at least 84%, at least 85%, at least 86%, at least 87%, at least 88%, at least 89%, at least 90%, at least 91%, at least 92%, at least 93%, at least 94%, at least 95%, at least 96%, at least 97%, at least 98%, or at least 99% sequence identity to SEQ ID NO: 1, provided that the amino acid sequence comprises mutations of S128A, L153P, N162E, N219G, K229E, K324I, F333N, 177_183KEYQSNKdelinsRDNRDN (SEQ ID NOs: 920 and 919), wherein the positions correspond to SEQ ID NO: 1, and provided that the amino acid sequence comprises a cysteine (C) at a position in the polypeptide that corresponds to position 125 of SEQ ID NO: 1, a histidine (H) at a position in the polypeptide that corresponds to position 283 of SEQ ID NO: 1, an aspartic acid (D) at a position in the polypeptide that corresponds to position 305 of SEQ ID NO: 1, an aspartic acid (D) at a position in the polypeptide that corresponds to position 307 of SEQ ID NO: 1, and/or a lysine (K) at a position in the polypeptide that corresponds to position 115 of SEQ ID NO: 1. In some embodiments, the polypeptide having protease activity comprises an amino acid sequence having at least 50%, at least 60%, at least 70%, at least 80%, at least 81%, at least 82%, at least 83%, at least 84%, at least 85%, at least 86%, at least 87%, at least 88%, at least 89%, at least 90%, at least 91%, at least 92%, at least 93%, at least 94%, at least 95%, at least 96%, at least 97%, at least 98%, or at least 99% sequence identity to SEQ ID NO: 1, provided that the amino acid sequence comprises mutations of S128A, L153P, N162E, N219G, K229E, H275Y, K324I, F333N, 177_183KEYQSNKdelinsRDNRDN (SEQ ID NOs: 920 and 919), wherein the positions correspond to SEQ ID NO: 1, and provided that the amino acid sequence comprises a cysteine ID NO: 1, and/or a lysine (K) at a position in the polypeptide that corresponds to position 115 of SEQ ID NO: 1. In some embodiments, the polypeptide having protease activity comprises an amino acid sequence having at least 50%, at least 60%, at least 70%, at least 80%, at least 81%, at least 82%, at least 83%, at least 84%, at least 85%, at least 86%, at least 87%, at least 88%, at least 89%, at least 90%, at least 91%, at least 92%, at least 93%, at least 94%, at least 95%, at least 96%, at least 97%, at least 98%, or at least 99% sequence identity to SEQ ID NO: 1, provided that the amino acid sequence comprises mutations of T122S, S128A, L153P, N162E, N219G, K229E, K324I, F333N, 177_183KEYQSNKdelinsRDNRDN (SEQ ID NOs: 920 and 919), wherein the positions correspond to SEQ ID NO: 1, and provided that the amino acid sequence comprises a cysteine (C) at a position in the polypeptide that corresponds to position 125 of SEQ ID NO: 1, a histidine (H) at a position in the polypeptide that corresponds to position 283 of SEQ ID NO: 1, an aspartic acid (D) at a position in the polypeptide that corresponds to position 305 of SEQ ID NO: 1, an aspartic acid (D) at a position in the polypeptide that corresponds to position 307 of SEQ ID NO: 1, and/or a lysine (K) at a position in the polypeptide that corresponds to position 115 of SEQ ID NO: 1. In some embodiments, the polypeptide having protease activity comprises an amino acid sequence having at least 50%, at least 60%, at least 70%, at least 80%, at least 81%, at least 82%, at least 83%, at least 84%, at least 85%, at least 86%, at least 87%, at least 88%, at least 89%, at least 90%, at least 91%, at least 92%, at least 93%, at least 94%, at least 95%, at least 96%, at least 97%, at least 98%, or at least 99% sequence identity to SEQ ID NO: 1, provided that the amino acid sequence comprises mutations of S128A, L153P, N162E, N219G, K229E, H275Y, R280T, K324I, F333N, 177_183KEYQSNKdelinsRDNRDN (SEQ ID NOs: 920 and 919), wherein the positions correspond to SEQ ID NO: 1, and provided that the amino acid sequence comprises a cysteine (C) at a position in the polypeptide that corresponds to position 125 of SEQ ID NO: 1, a histidine (H) at a position in the polypeptide that corresponds to position 283 of SEQ ID NO: 1, an aspartic acid (D) at a position in the polypeptide that corresponds to position 305 of SEQ ID NO: 1, an aspartic acid (D) at a position in the polypeptide that corresponds to position 307 of SEQ ID NO: 1, and/or a lysine (K) at a position in the polypeptide that corresponds to position 115 of SEQ ID NO: 1. In some embodiments, the polypeptide having protease activity comprises an amino acid sequence having at least 50%, at least 60%, at least 70%, at least 80%, at least 81%, at least 82%, at least 83%, at least 84%, at least 85%, at least 86%, at least 87%, at least 88%, at least 89%, at least 90%, at least 91%, at least 92%, at least 93%, at least 94%, at least 95%, at least 96%, at least 97%, at least 98%, or at least 99% sequence identity to SEQ ID NO: 1, provided that the amino acid sequence comprises mutations of T122S, S128A, L153P, N162E, N219G, K229E, R280T, K324I, F333N, 177_183KEYQSNKdelinsRDNRDN (SEQ ID NOS: 920 and 919), wherein the positions correspond to SEQ ID NO: 1, and provided that the amino acid sequence comprises a cysteine (C) at a position in the polypeptide that corresponds to position 125 of SEQ ID NO: 1, a histidine (H) at a position in the polypeptide that corresponds to position 283 of SEQ ID NO: 1, an aspartic acid (D) at a position in the polypeptide that corresponds to position 305 of SEQ ID NO: 1, an aspartic acid (D) at a position in the polypeptide that corresponds to position 307 of SEQ ID NO: 1, and/or a lysine (K) at a position in the polypeptide that corresponds to position 115 of SEQ ID NO: 1. In some embodiments, the polypeptide having protease activity comprises an amino acid sequence having at least 50%, at least 60%, at least 70%, at least 80%, at least 81%, at least 82%, at least 83%, at least 84%, at least 85%, at least 86%, at least 87%, at least 88%, at least 89%, at least 90%, at least 91%, at least 92%, at least 93%, at least 94%, at least 95%, at least 96%, at least 97%, at least 98%, or at least 99% sequence identity to SEQ ID NO: 1, provided that the amino acid sequence comprises mutations of D71Q, S128A, L153P, N162E, N219G, K229E, K324I, F333N, 177_183KEYQSNKdelinsRDNRDN (SEQ ID NOs: 920 and 919), wherein the positions correspond to SEQ ID NO: 1, and provided that the amino acid sequence comprises a cysteine (C) at a position in the polypeptide that corresponds to position 125 of SEQ ID NO: 1, a histidine (H) at a position in the polypeptide that corresponds to position 283 of SEQ ID NO: 1, an aspartic acid (D) at a position in the polypeptide that corresponds to position 305 of SEQ ID NO: 1, an aspartic acid (D) at a position in the polypeptide that corresponds to position 307 of SEQ ID NO: 1, and/or a lysine (K) at a position in the polypeptide that corresponds to position 115 of SEQ ID NO: 1. In some embodiments, the polypeptide having protease activity comprises an amino acid sequence having at least 50%, at least 60%, at least 70%, at least 80%, at least 81%, at least 82%, at least 83%, at least 84%, at least 85%, at least 86%, at least 87%, at least 88%, at least 89%, at least 90%, at least 91%, at least 92%, at least 93%, at least 94%, at least 95%, at least 96%, at least 97%, at least 98%, or at least 99% sequence identity to SEQ ID NO: 1, provided that the amino acid sequence comprises mutations of T122S, S128A, L153P, N162E, N219G, K229E, H275Y, K324I, F333N, 177_183KEYQSNKdelinsRDNRDN (SEQ ID NOs: 920 and 919), wherein the positions correspond to SEQ ID NO: 1, and provided that the amino acid sequence comprises a cysteine (C) at a position in the polypeptide that corresponds to position 125 of SEQ ID NO: 1, a histidine (H) at a position in the polypeptide that corresponds to position 283 of SEQ ID NO: 1, an aspartic acid (D) at a position in the polypeptide that corresponds to position 305 of SEQ ID NO: 1, an aspartic acid (D) at a position in the polypeptide that corresponds to position 307 of SEQ ID NO: 1, and/or a lysine (K) at a position in the polypeptide that corresponds to position 115 of SEQ ID NO: 1. In some embodiments, the polypeptide having protease activity comprises an amino acid sequence having at least 50%, at least 60%, at least 70%, at least 80%, at least 81%, at least 82%, at least 83%, at least 84%, at least 85%, at least 86%, at least 87%, at least 88%, at least 89%, at least 90%, at least 91%, at least 92%, at least 93%, at least 94%, at least 95%, at least 96%, at least 97%, at least 98%, or at least 99% sequence identity to SEQ ID NO: 1, provided that the amino acid sequence comprises mutations of S128A, L153P, N162E, N219G, K229E, H275Y, K318S, K324I, F333N, 177_183KEYQSNKdelinsRDNRDN (SEQ ID NOs: 920 and 919), wherein the positions correspond to SEQ ID NO: 1, and provided that the amino acid sequence comprises a cysteine (C) at a position in the polypeptide that corresponds to position 125 of SEQ ID NO: 1, a histidine (H) at a position in the polypeptide that corresponds to position 283 of SEQ ID NO: 1, an aspartic acid (D) at a position in the polypeptide that corresponds to position 305 of SEQ ID NO: 1, an aspartic acid (D) at a position in the polypeptide that corresponds to position 307 of SEQ ID NO: 1, and/or a lysine (K) at a position in the polypeptide that corresponds to position 115 of SEQ ID NO: 1. In some embodiments, the polypeptide having protease activity comprises an amino acid sequence having at least 50%, at least 60%, at least 70%, at least 80%, at least 81%, at least 82%, at least 83%, at least 84%, at least 85%, at least 86%, at least 87%, at least 88%, at least 89%, at least 90%, at least 91%, at least 92%, at least 93%, at least 94%, at least 95%, at least 96%, at least 97%, at least 98%, or at least 99% sequence identity to SEQ ID NO: 1, provided that the amino acid sequence comprises mutations of S128A, L153P, N162E, N219G, K229E, K318S, K324I, F333N, 177_183KEYQSNKdelinsRDNRDN (SEQ ID NOs: 920 and 919), wherein the positions correspond to SEQ ID NO: 1, and provided that the amino acid sequence comprises a cysteine (C) at a position in the polypeptide that corresponds to position 125 of SEQ ID NO: 1, a histidine (H) at a position in the polypeptide that corresponds to position 283 of SEQ ID NO: 1, an aspartic acid (D) at a position in the polypeptide that corresponds to position 305 of SEQ ID NO: 1, an aspartic acid (D) at a position in the polypeptide that corresponds to position 307 of SEQ ID NO: 1, and/or a lysine (K) at a position in the polypeptide that corresponds to position 115 of SEQ ID NO: 1. In some embodiments, the polypeptide having protease activity comprises an amino acid sequence having at least 50%, at least 60%, at least 70%, at least 80%, at least 81%, at least 82%, at least 83%, at least 84%, at least 85%, at least 86%, at least 87%, at least 88%, at least 89%, at least 90%, at least 91%, at least 92%, at least 93%, at least 94%, at least 95%, at least 96%, at least 97%, at least 98%, or at least 99% sequence identity to SEQ ID NO: 1, provided that the amino acid sequence comprises mutations of S128A, L153P, N219G, H275Y, K324I, F333N, 177_183KEYQSNKdelinsRDNRDN (SEQ ID NOs: 920 and 919), wherein the positions correspond to SEQ ID NO: 1, and provided that the amino acid sequence comprises a cysteine (C) at a position in the polypeptide that corresponds to position 125 of SEQ ID NO: 1, a histidine (H) at a position in the polypeptide that corresponds to position 283 of SEQ ID NO: 1, an aspartic acid (D) at a position in the polypeptide that corresponds to position 305 of SEQ ID NO: 1, an aspartic acid (D) at a position in the polypeptide that corresponds to position 307 of SEQ ID NO: 1, and/or a lysine (K) at a position in the polypeptide that corresponds to position 115 of SEQ ID NO: 1. In some embodiments, the polypeptide having protease activity comprises an amino acid sequence having at least 50%, at least 60%, at least 70%, at least 80%, at least 81%, at least 82%, at least 83%, at least 84%, at least 85%, at least 86%, at least 87%, at least 88%, at least 89%, at least 90%, at least 91%, at least 92%, at least 93%, at least 94%, at least 95%, at least 96%, at least 97%, at least 98%, or at least 99% sequence identity to SEQ ID NO: 1, provided that the amino acid sequence comprises mutations of T122S, S128A, L153P, N219G, K324I, F333N, 177_183KEYQSNKdelinsRDNRDN (SEQ ID NOs: 920 and 919), wherein the positions correspond to SEQ ID NO: 1, and provided that the amino acid sequence comprises a cysteine (C) at a position in the polypeptide that corresponds to position 125 of SEQ ID NO: 1, a histidine (H) at a position in the polypeptide that corresponds to position 283 of SEQ ID NO: 1, an aspartic acid (D) at a position in the polypeptide that corresponds to position 305 of SEQ ID NO: 1, an aspartic acid (D) at a position in the polypeptide that corresponds to position 307 of SEQ ID NO: 1, and/or a lysine (K) at a position in the polypeptide that corresponds to position 115 of SEQ ID NO: 1. In some embodiments, the polypeptide having protease activity comprises an amino acid sequence having at least 50%, at least 60%, at least 70%, at least 80%, at least 81%, at least 82%, at least 83%, at least 84%, at least 85%, at least 86%, at least 87%, at least 88%, at least 89%, at least 90%, at least 91%, at least 92%, at least 93%, at least 94%, at least 95%, at least 96%, at least 97%, at least 98%, or at least 99% sequence identity to SEQ ID NO: 1, provided that the amino acid sequence comprises mutations of D71Q, S128A, L153P, N219G, K324I, F333N, 177_183KEYQSNKdelinsRDNRDN (SEQ ID NOs: 920 and 919), wherein the positions correspond to SEQ ID NO: 1, and provided that the amino acid sequence comprises a cysteine (C) at a position in the polypeptide that corresponds to position 125 of SEQ ID NO: 1, a histidine (H) at a position in the polypeptide that corresponds to position 283 of SEQ ID NO: 1, an aspartic acid (D) at a position in the polypeptide that corresponds to position 305 of SEQ ID NO: 1, an aspartic acid (D) at a position in the polypeptide that corresponds to position 307 of SEQ ID NO: 1, and/or a lysine (K) at a position in the polypeptide that corresponds to position 115 of SEQ ID NO: 1. In some embodiments, the polypeptide having protease activity comprises an amino acid sequence having at least 50%, at least 60%, at least 70%, at least 80%, at least 81%, at least 82%, at least 83%, at least 84%, at least 85%, at least 86%, at least 87%, at least 88%, at least 89%, at least 90%, at least 91%, at least 92%, at least 93%, at least 94%, at least 95%, at least 96%, at least 97%, at least 98%, or at least 99% sequence identity to SEQ ID NO: 1, provided that the amino acid sequence comprises mutations of S128A, L153P, N162E, N219Q, K229E, K324I, F333N, 177_183KEYQSNKdelinsRDNRDN (SEQ ID NOs: 920 and 919), wherein the positions correspond to SEQ ID NO: 1, and provided that the amino acid sequence comprises a cysteine (C) at a position in the polypeptide that corresponds to position 125 of SEQ ID NO: 1, a histidine (H) at a position in the polypeptide that corresponds to position 283 of SEQ ID NO: 1, an aspartic acid (D) at a position in the polypeptide that corresponds to position 305 of SEQ ID NO: 1, an aspartic acid (D) at a position in the polypeptide that corresponds to position 307 of SEQ ID NO: 1, and/or a lysine (K) at a position in the polypeptide that corresponds to position 115 of SEQ ID NO: 1. In some embodiments, the polypeptide having protease activity comprises an amino acid sequence having at least 50%, at least 60%, at least 70%, at least 80%, at least 81%, at least 82%, at least 83%, at least 84%, at least 85%, at least 86%, at least 87%, at least 88%, at least 89%, at least 90%, at least 91%, at least 92%, at least 93%, at least 94%, at least 95%, at least 96%, at least 97%, at least 98%, or at least 99% sequence identity to SEQ ID NO: 1, provided that the amino acid sequence comprises mutations of D71Q, S128A, L153P, N162E, N219Q, K229E, K324I, F333N, 177_183KEYQSNKdelinsRDNRDN (SEQ ID NOs: 920 and 919), wherein the positions correspond to SEQ ID NO: 1, and provided that the amino acid sequence comprises a cysteine (C) at a position in the polypeptide that corresponds to position 125 of SEQ ID NO: 1, a histidine (H) at a position in the polypeptide that corresponds to position 283 of SEQ ID NO: 1, an aspartic acid (D) at a position in the polypeptide that corresponds to position 305 of SEQ ID NO: 1, an aspartic acid (D) at a position in the polypeptide that corresponds to position 307 of SEQ ID NO: 1, and/or a lysine (K) at a position in the polypeptide that corresponds to position 115 of SEQ ID NO: 1. In some embodiments, the polypeptide having protease activity comprises an amino acid sequence having at least 50%, at least 60%, at least 70%, at least 80%, at least 81%, at least 82%, at least 83%, at least 84%, at least 85%, at least 86%, at least 87%, at least 88%, at least 89%, at least 90%, at least 91%, at least 92%, at least 93%, at least 94%, at least 95%, at least 96%, at least 97%, at least 98%, or at least 99% sequence identity to SEQ ID NO: 1, provided that the amino acid sequence comprises mutations of S128A, L153P, N162E, N219Q, K229E, H275Y, K324I, F333N, 177_183KEYQSNKdelinsRDNRDN (SEQ ID NOs: 920 and 919), wherein the positions correspond to SEQ ID NO: 1, and provided that the amino acid sequence comprises a cysteine (C) at a position in the polypeptide that corresponds to position 125 of SEQ ID NO: 1, a histidine (H) at a position in the polypeptide that corresponds to position 283 of SEQ ID NO: 1, an aspartic acid (D) at a position in the polypeptide that corresponds to position 305 of SEQ ID NO: 1, an aspartic acid (D) at a position in the polypeptide that corresponds to position 307 of SEQ ID NO: 1, and/or a lysine (K) at a position in the polypeptide that corresponds to position 115 of SEQ ID NO: 1. In some embodiments, the polypeptide having protease activity comprises an amino acid sequence having at least 50%, at least 60%, at least 70%, at least 80%, at least 81%, at least 82%, at least 83%, at least 84%, at least 85%, at least 86%, at least 87%, at least 88%, at least 89%, at least 90%, at least 91%, at least 92%, at least 93%, at least 94%, at least 95%, at least 96%, at least 97%, at least 98%, or at least 99% sequence identity to SEQ ID NO: 1, provided that the amino acid sequence comprises mutations of T122S, S128A, L153P, N162E, N219Q, K229E, K324I, F333N, 177_183KEYQSNKdelinsRDNRDN (SEQ ID NOs: 920 and 919), wherein the positions correspond to SEQ ID NO: 1, and provided that the amino acid sequence comprises a cysteine (H) at a position in the polypeptide that corresponds to position 283 of SEQ ID NO: 1, an aspartic acid (D) at a position in the polypeptide that corresponds to position 305 of SEQ ID NO: 1, an aspartic acid (D) at a position in the polypeptide that corresponds to position 307 of SEQ ID NO: 1, and/or a lysine (K) at a position in the polypeptide that corresponds to position 115 of SEQ ID NO: 1. In some embodiments, the polypeptide having protease activity comprises an amino acid sequence having at least 50%, at least 60%, at least 70%, at least 80%, at least 81%, at least 82%, at least 83%, at least 84%, at least 85%, at least 86%, at least 87%, at least 88%, at least 89%, at least 90%, at least 91%, at least 92%, at least 93%, at least 94%, at least 95%, at least 96%, at least 97%, at least 98%, or at least 99% sequence identity to SEQ ID NO: 1, provided that the amino acid sequence comprises mutations of S128A, L153P, N162E, N219Q, K229E, H275Y, R280T, K324I, F333N, 177_183KEYQSNKdelinsRDNRDN (SEQ ID NOs: 920 and 919), wherein the positions correspond to SEQ ID NO: 1, and provided that the amino acid sequence comprises a cysteine (C) at a position in the polypeptide that corresponds to position 125 of SEQ ID NO: 1, a histidine (H) at a position in the polypeptide that corresponds to position 283 of SEQ ID NO: 1, an aspartic acid (D) at a position in the polypeptide that corresponds to position 305 of SEQ ID NO: 1, an aspartic acid (D) at a position in the polypeptide that corresponds to position 307 of SEQ ID NO: 1, and/or a lysine (K) at a position in the polypeptide that corresponds to position 115 of SEQ ID NO: 1. In some embodiments, the polypeptide having protease activity comprises an amino acid sequence having at least 50%, at least 60%, at least 70%, at least 80%, at least 81%, at least 82%, at least 83%, at least 84%, at least 85%, at least 86%, at least 87%, at least 88%, at least 89%, at least 90%, at least 91%, at least 92%, at least 93%, at least 94%, at least 95%, at least 96%, at least 97%, at least 98%, or at least 99% sequence identity to SEQ ID NO: 1, provided that the amino acid sequence comprises mutations of T122S, S128A, L153P, N162E, N219Q, K229E, R280T, K324I, F333N, 177_183KEYQSNKdelinsRDNRDN (SEQ ID NOs: 920 and 919), wherein the positions correspond to SEQ ID NO: 1, and provided that the amino acid sequence comprises a cysteine (C) at a position in the polypeptide that corresponds to position 125 of SEQ ID NO: 1, a histidine (H) at a position in the polypeptide that corresponds to position 283 of SEQ ID NO: 1, an aspartic acid (D) at a position in the polypeptide that corresponds to position 305 of SEQ ID NO: 1, an aspartic acid (D) at a position in the polypeptide that corresponds to position 307 of SEQ ID NO: 1, and/or a lysine (K) at a position in the polypeptide that corresponds to position 115 of SEQ ID NO: 1. In some embodiments, the polypeptide having protease activity comprises an amino acid sequence having at least 50%, at least 60%, at least 70%, at least 80%, at least 81%, at least 82%, at least 83%, at least 84%, at least 85%, at least 86%, at least 87%, at least 88%, at least 89%, at least 90%, at least 91%, at least 92%, at least 93%, at least 94%, at least 95%, at least 96%, at least 97%, at least 98%, or at least 99% sequence identity to SEQ ID NO: 1, provided that the amino acid sequence comprises mutations of T122S, S128A, L153P, N162E, N219Q, K229E, H275Y, K324I, F333N, 177_183KEYQSNKdelinsRDNRDN (SEQ ID NOs: 920 and 919), wherein the positions correspond to SEQ ID NO: 1, and provided that the amino acid sequence comprises a cysteine (C) at a position in the polypeptide that corresponds to position 125 of SEQ ID NO: 1, a histidine (H) at a position in the polypeptide that corresponds to position 283 of SEQ ID NO: 1, an aspartic acid (D) at a position in the polypeptide that corresponds to position 305 of SEQ ID NO: 1, an aspartic acid (D) at a position in the polypeptide that corresponds to position 307 of SEQ ID NO: 1, and/or a lysine (K) at a position in the polypeptide that corresponds to position 115 of SEQ ID NO: 1. In some embodiments, the polypeptide having protease activity comprises an amino acid sequence having at least 50%, at least 60%, at least 70%, at least 80%, at least 81%, at least 82%, at least 83%, at least 84%, at least 85%, at least 86%, at least 87%, at least 88%, at least 89%, at least 90%, at least 91%, at least 92%, at least 93%, at least 94%, at least 95%, at least 96%, at least 97%, at least 98%, or at least 99% sequence identity to SEQ ID NO: 1, provided that the amino acid sequence comprises mutations of S128A, L153P, N162E, N219Q, K229E, H275Y, K318S, K324I, F333N, 177_183KEYQSNKdelinsRDNRDN (SEQ ID NOs: 920 and 919), wherein the positions correspond to SEQ ID NO: 1, and provided that the amino acid sequence comprises a cysteine (C) at a position in the polypeptide that corresponds to position 125 of SEQ ID NO: 1, a histidine (H) at a position in the polypeptide that corresponds to position 283 of SEQ ID NO: 1, an aspartic acid (D) at a position in the polypeptide that corresponds to position 305 of SEQ ID NO: 1, an aspartic acid (D) at a position in the polypeptide that corresponds to position 307 of SEQ ID NO: 1, and/or a lysine (K) at a position in the polypeptide that corresponds to position 115 of SEQ ID NO: 1. In some embodiments, the polypeptide having protease activity comprises an amino acid sequence having at least 50%, at least 60%, at least 70%, at least 80%, at least 81%, at least 82%, at least 83%, at least 84%, at least 85%, at least 86%, at least 87%, at least 88%, at least 89%, at least 90%, at least 91%, at least 92%, at least 93%, at least 94%, at least 95%, at least 96%, at least 97%, at least 98%, or at least 99% sequence identity to SEQ ID NO: 1, provided that the amino acid sequence comprises mutations of S128A, L153P, N162E, N219Q, K229E, K318S, K324I, F333N, 177_183KEYQSNKdelinsRDNRDN (SEQ ID NOs: 920 and 919), wherein the positions correspond to SEQ ID NO: 1, and provided that the amino acid sequence comprises a cysteine (C) at a position in the polypeptide that corresponds to position 125 of SEQ ID NO: 1, a histidine (H) at a position in the polypeptide that corresponds to position 283 of SEQ ID NO: 1, an aspartic acid (D) at a position in the polypeptide that corresponds to position 305 of SEQ ID NO: 1, an aspartic acid (D) at a position in the polypeptide that corresponds to position 307 of SEQ ID NO: 1, and/or a lysine (K) at a position in the polypeptide that corresponds to position 115 of SEQ ID NO: 1. In some embodiments, the polypeptide having protease activity comprises an amino acid sequence having at least 50%, at least 60%, at least 70%, at least 80%, at least 81%, at least 82%, at least 83%, at least 84%, at least 85%, at least 86%, at least 87%, at least 88%, at least 89%, at least 90%, at least 91%, at least 92%, at least 93%, at least 94%, at least 95%, at least 96%, at least 97%, at least 98%, or at least 99% sequence identity to SEQ ID NO: 1, provided that the amino acid sequence comprises mutations of S128A, L153P, N219Q, H275Y, K324I, F333N, 177_183KEYQSNKdelinsRDNRDN (SEQ ID NOs: 920 and 919), wherein the positions correspond to SEQ ID NO: 1, and provided that the amino acid sequence comprises a cysteine (C) at a position in the polypeptide that corresponds to position 125 of SEQ ID NO: 1, a histidine (H) at a position in the polypeptide that corresponds to position 283 of SEQ ID NO: 1, an aspartic acid (D) at a position in the polypeptide that corresponds to position 305 of SEQ ID NO: 1, an aspartic acid (D) at a position in the polypeptide that corresponds to position 307 of SEQ ID NO: 1, and/or a lysine (K) at a position in the polypeptide that corresponds to position 115 of SEQ ID NO: 1. In some embodiments, the polypeptide having protease activity comprises an amino acid sequence having at least 50%, at least 60%, at least 70%, at least 80%, at least 81%, at least 82%, at least 83%, at least 84%, at least 85%, at least 86%, at least 87%, at least 88%, at least 89%, at least 90%, at least 91%, at least 92%, at least 93%, at least 94%, at least 95%, at least 96%, at least 97%, at least 98%, or at least 99% sequence identity to SEQ ID NO: 1, provided that the amino acid sequence comprises mutations of T122S, S128A, L153P, N219Q, K324I, F333N, 177_183KEYQSNKdelinsRDNRDN (SEQ ID NOs: 920 and 919), wherein the positions correspond to SEQ ID NO: 1, and provided that the amino acid sequence comprises a cysteine (C) at a position in the polypeptide that corresponds to position 125 of SEQ ID NO: 1, a histidine (H) at a position in the polypeptide that corresponds to position 283 of SEQ ID NO: 1, an aspartic acid (D) at a position in the polypeptide that corresponds to position 305 of SEQ ID NO: 1, an aspartic acid (D) at a position in the polypeptide that corresponds to position 307 of SEQ ID NO: 1, and/or a lysine (K) at a position in the polypeptide that corresponds to position 115 of SEQ ID NO: 1. In some embodiments, the polypeptide having protease activity comprises an amino acid sequence having at least 50%, at least 60%, at least 70%, at least 80%, at least 81%, at least 82%, at least 83%, at least 84%, at least 85%, at least 86%, at least 87%, at least 88%, at least 89%, at least 90%, at least 91%, at least 92%, at least 93%, at least 94%, at least 95%, at least 96%, at least 97%, at least 98%, or at least 99% sequence identity to SEQ ID NO: 1, provided that the amino acid sequence comprises mutations of D71Q, S128A, L153P, N219Q, K324I, F333N, 177_183KEYQSNKdelinsRDNRDN (SEQ ID NOs: 920 and 919), wherein the positions correspond to SEQ ID NO: 1, and provided that the amino acid sequence comprises a cysteine (C) at a position in the polypeptide that corresponds to position 125 of SEQ ID NO: 1, a histidine (H) at a position in the polypeptide that corresponds to position 283 of SEQ ID NO: 1, an aspartic acid (D) at a position in the polypeptide that corresponds to position 305 of SEQ ID NO: 1, an aspartic acid (D) at a position in the polypeptide that corresponds to position 307 of SEQ ID NO: 1, and/or a lysine (K) at a position in the polypeptide that corresponds to position 115 of SEQ ID NO: 1. In some embodiments, the polypeptide having protease activity comprises an amino acid sequence having at least 50%, at least 60%, at least 70%, at least 80%, at least 81%, at least 82%, at least 83%, at least 84%, at least 85%, at least 86%, at least 87%, at least 88%, at least 89%, at least 90%, at least 91%, at least 92%, at least 93%, at least 94%, at least 95%, at least 96%, at least 97%, at least 98%, or at least 99% sequence identity to SEQ ID NO: 1, provided that the amino acid sequence comprises mutations of S128A, L153P, N162E, K229E, K324I, F333N, 177_183KEYQSNKdelinsRDNRDN (SEQ ID NOs: 920 and 919), wherein the positions correspond to SEQ ID NO: 1, and provided that the amino acid sequence comprises a cysteine (C) at a position in the polypeptide that corresponds to position 125 of SEQ ID NO: 1, a histidine (H) at a position in the polypeptide that corresponds to position 283 of SEQ ID NO: 1, an aspartic acid (D) at a position in the polypeptide that corresponds to position 305 of SEQ ID NO: 1, an aspartic acid (D) at a position in the polypeptide that corresponds to position 307 of SEQ ID NO: 1, and/or a lysine (K) at a position in the polypeptide that corresponds to position 115 of SEQ ID NO: 1. In some embodiments, the polypeptide having protease activity comprises an amino acid sequence having at least 50%, at least 60%, at least 70%, at least 80%, at least 81%, at least 82%, at least 83%, at least 84%, at least 85%, at least 86%, at least 87%, at least 88%, at least 89%, at least 90%, at least 91%, at least 92%, at least 93%, at least 94%, at least 95%, at least 96%, at least 97%, at least 98%, or at least 99% sequence identity to SEQ ID NO: 1, provided that the amino acid sequence comprises mutations of S128A, L153P, N162E, K229E, H275Y, K324I, F333N, 177_183KEYQSNKdelinsRDNRDN (SEQ ID NOs: 920 and 919), wherein the positions correspond to SEQ ID NO: 1, and provided that the amino acid sequence comprises a cysteine (C) at a position in the polypeptide that corresponds to position 125 of SEQ ID NO: 1, a histidine (H) at a position in the polypeptide that corresponds to position 283 of SEQ ID NO: 1, an aspartic acid (D) at a position in the polypeptide that corresponds to position 305 of SEQ ID NO: 1, an aspartic acid (D) at a position in the polypeptide that corresponds to position 307 of SEQ ID NO: 1, and/or a lysine (K) at a position in the polypeptide that corresponds to position 115 of SEQ ID NO: 1. In some embodiments, the polypeptide having protease activity comprises an amino acid sequence having at least 50%, at least 60%, at least 70%, at least 80%, at least 81%, at least 82%, at least 83%, at least 84%, at least 85%, at least 86%, at least 87%, at least 88%, at least 89%, at least 90%, at least 91%, at least 92%, at least 93%, at least 94%, at least 95%, at least 96%, at least 97%, at least 98%, or at least 99% sequence identity to SEQ ID NO: 1, provided that the amino acid sequence comprises mutations of T122S, S128A, L153P, N162E, K229E, K324I, F333N, 177_183KEYQSNKdelinsRDNRDN (SEQ ID NOs: 920 and 919), wherein the positions correspond to SEQ ID NO: 1, and provided that the amino acid sequence comprises a cysteine (C) at a position in the polypeptide that corresponds to position 125 of SEQ ID NO: 1, a histidine (H) at a position in the polypeptide that corresponds to position 283 of SEQ ID NO: 1, an aspartic acid (D) at a position in the polypeptide that corresponds to position 305 of SEQ ID NO: 1, an aspartic acid (D) at a position in the polypeptide that corresponds to position 307 of SEQ ID NO: 1, and/or a lysine (K) at a position in the polypeptide that corresponds to position 115 of SEQ ID NO: 1. In some embodiments, the polypeptide having protease activity comprises an amino acid sequence having at least 50%, at least 60%, at least 70%, at least 80%, at least 81%, at least 82%, at least 83%, at least 84%, at least 85%, at least 86%, at least 87%, at least 88%, at least 89%, at least 90%, at least 91%, at least 92%, at least 93%, at least 94%, at least 95%, at least 96%, at least 97%, at least 98%, or at least 99% sequence identity to SEQ ID NO: 1, provided that the amino acid sequence comprises mutations of S128A, L153P, N162E, H174E, G199P, N219G, K229E, H275Y, K324I, F333N, 177_183KEYQSNKdelinsRDNRDN (SEQ ID NOs: 920 and 919), wherein the positions correspond to SEQ ID NO: 1, and provided that the amino acid sequence comprises a cysteine (C) at a position in the polypeptide that corresponds to position 125 of SEQ ID NO: 1, a histidine (H) at a position in the polypeptide that corresponds to position 283 of SEQ ID NO: 1, an aspartic acid (D) at a position in the polypeptide that corresponds to position 305 of SEQ ID NO: 1, an aspartic acid (D) at a position in the polypeptide that corresponds to position 307 of SEQ ID NO: 1, and/or a lysine (K) at a position in the polypeptide that corresponds to position 115 of SEQ ID NO: 1. In some embodiments, the polypeptide having protease activity comprises an amino acid sequence having at least 50%, at least 60%, at least 70%, at least 80%, at least 81%, at least 82%, at least 83%, at least 84%, at least 85%, at least 86%, at least 87%, at least 88%, at least 89%, at least 90%, at least 91%, at least 92%, at least 93%, at least 94%, at least 95%, at least 96%, at least 97%, at least 98%, or at least 99% sequence identity to SEQ ID NO: 1, provided that the amino acid sequence comprises mutations of S128A, L153P, N162E, H174E, G199P, N219G, K229E, I262K, H275Y, K324I, F333N, 177_183KEYQSNKdelinsRDNRDN (SEQ ID NOs: 920 and 919), wherein the positions correspond to SEQ ID NO: 1, and provided that the amino acid sequence comprises a cysteine (C) at a position in the polypeptide that corresponds to position 125 of SEQ ID NO: 1, a histidine (H) at a position in the polypeptide that corresponds to position 283 of SEQ ID NO: 1, an aspartic acid (D) at a position in the polypeptide that corresponds to position 305 of SEQ ID NO: 1, an aspartic acid (D) at a position in the polypeptide that corresponds to position 307 of SEQ ID NO: 1, and/or a lysine (K) at a position in the polypeptide that corresponds to position 115 of SEQ ID NO: 1. In some embodiments, the polypeptide having protease activity comprises an amino acid sequence having at least 50%, at least 60%, at least 70%, at least 80%, at least 81%, at least 82%, at least 83%, at least 84%, at least 85%, at least 86%, at least 87%, at least 88%, at least 89%, at least 90%, at least 91%, at least 92%, at least 93%, at least 94%, at least 95%, at least 96%, at least 97%, at least 98%, or at least 99% sequence identity to SEQ ID NO: 1, provided that the amino acid sequence comprises mutations of S128A, L153P, N162E, H174E, G199P, N219G, K229E, H275Y, R282G, K324I, F333N, 177_183KEYQSNKdelinsRDNRDN (SEQ ID NOs: 920 and 919), wherein the positions correspond to SEQ ID NO: 1, and provided that the amino acid sequence comprises a cysteine (C) at a position in the polypeptide that corresponds to position 125 of SEQ ID NO: 1, a histidine (H) at a position in the polypeptide that corresponds to position 283 of SEQ ID NO: 1, an aspartic acid (D) at a position in the polypeptide that corresponds to position 305 of SEQ ID NO: 1, an aspartic acid (D) at a position in the polypeptide that corresponds to position 307 of SEQ ID NO: 1, and/or a lysine (K) at a position in the polypeptide that corresponds to position 115 of SEQ ID NO: 1. In some embodiments, the polypeptide having protease activity comprises an amino acid sequence having at least 50%, at least 60%, at least 70%, at least 80%, at least 81%, at least 82%, at least 83%, at least 84%, at least 85%, at least 86%, at least 87%, at least 88%, at least 89%, at least 90%, at least 91%, at least 92%, at least 93%, at least 94%, at least 95%, at least 96%, at least 97%, at least 98%, or at least 99% sequence identity to SEQ ID NO: 1, provided that the amino acid sequence comprises mutations of K93D, S128A, K150E, L153P, N162E, H174E, G199P, N219G, K229E, H275Y, R282G, K324I, F333N, 177_183KEYQSNKdelinsRDNRDN (SEQ ID NOs: 920 and 919), wherein the positions correspond to SEQ ID NO: 1, and provided that the amino acid sequence comprises a cysteine (C) at a position in the polypeptide that corresponds to position 125 of SEQ ID NO: 1, a histidine (H) at a position in the polypeptide that corresponds to position 283 of SEQ ID NO: 1, an aspartic acid (D) at a position in the polypeptide that corresponds to position 305 of SEQ ID NO: 1, an aspartic acid (D) at a position in the polypeptide that corresponds to position 307 of SEQ ID NO: 1, and/or a lysine (K) at a position in the polypeptide that corresponds to position 115 of SEQ ID NO: 1. In some embodiments, the polypeptide having protease activity comprises an amino acid sequence having at least 50%, at least 60%, at least 70%, at least 80%, at least 81%, at least 82%, at least 83%, at least 84%, at least 85%, at least 86%, at least 87%, at least 88%, at least 89%, at least 90%, at least 91%, at least 92%, at least 93%, at least 94%, at least 95%, at least 96%, at least 97%, at least 98%, or at least 99% sequence identity to SEQ ID NO: 1, provided that the amino acid sequence comprises mutations of S128A, D139E, L153P, N162E, H174E, G199P, N219G, K229E, E241D, H275Y, R282G, K324I, F333N, 177_183KEYQSNKdelinsRDNRDN (SEQ ID NOs: 920 and 919), wherein the positions correspond to SEQ ID NO: 1, and provided that the amino acid sequence comprises a cysteine (C) at a position in the polypeptide that corresponds to position 125 of SEQ ID NO: 1, a histidine (H) at a position in the polypeptide that corresponds to position 283 of SEQ ID NO: 1, an aspartic acid (D) at a position in the polypeptide that corresponds to position 305 of SEQ ID NO: 1, an aspartic acid (D) at a position in the polypeptide that corresponds to position 307 of SEQ ID NO: 1, and/or a lysine (K) at a position in the polypeptide that corresponds to position 115 of SEQ ID NO: 1. In some embodiments, the polypeptide having protease activity comprises an amino acid sequence having at least 50%, at least 60%, at least 70%, at least 80%, at least 81%, at least 82%, at least 83%, at least 84%, at least 85%, at least 86%, at least 87%, at least 88%, at least 89%, at least 90%, at least 91%, at least 92%, at least 93%, at least 94%, at least 95%, at least 96%, at least 97%, at least 98%, or at least 99% sequence identity to SEQ ID NO: 1, provided that the amino acid sequence comprises mutations of S128A, L153P, N162E, H174E, G199P, N219G, K229E, H275Y, R282G, K324I, F333N, A343K, R360L, 177_183KEYQSNKdelinsRDNRDN (SEQ ID NOs: 920 and 919), wherein the positions correspond to SEQ ID NO: 1, and provided that the amino acid sequence comprises a cysteine (C) at a position in the polypeptide that corresponds to position 125 of SEQ ID NO: 1, a histidine (H) at a position in the polypeptide that corresponds to position 283 of SEQ ID NO: 1, an aspartic acid (D) at a position in the polypeptide that corresponds to position 305 of SEQ ID NO: 1, an aspartic acid (D) at a position in the polypeptide that corresponds to position 307 of SEQ ID NO: 1, and/or a lysine (K) at a position in the polypeptide that corresponds to position 115 of SEQ ID NO: 1. In some embodiments, the polypeptide having protease activity comprises an amino acid sequence having at least 50%, at least 60%, at least 70%, at least 80%, at least 81%, at least 82%, at least 83%, at least 84%, at least 85%, at least 86%, at least 87%, at least 88%, at least 89%, at least 90%, at least 91%, at least 92%, at least 93%, at least 94%, at least 95%, at least 96%, at least 97%, at least 98%, or at least 99% sequence identity to SEQ ID NO: 1, provided that the amino acid sequence comprises mutations of S128A, D139E, L153P, N162E, H174E, G199P, N219G, K229E, E241D, H275Y, R282G, K324I, F333N, A343K, R360L, 177_183KEYQSNKdelinsRDNRDN (SEQ ID NOs: 920 and 919), wherein the positions correspond to SEQ ID NO: 1, and provided that the amino acid sequence comprises a cysteine (C) at a position in the polypeptide that corresponds to position 125 of SEQ ID NO: 1, a histidine (H) at a position in the polypeptide that corresponds to position 283 of SEQ ID NO: 1, an aspartic acid (D) at a position in the polypeptide that corresponds to position 305 of SEQ ID NO: 1, an aspartic acid (D) at a position in the polypeptide that corresponds to position 307 of SEQ ID NO: 1, and/or a lysine (K) at a position in the polypeptide that corresponds to position 115 of SEQ ID NO: 1. In some embodiments, the polypeptide having protease activity comprises an amino acid sequence having at least 50%, at least 60%, at least 70%, at least 80%, at least 81%, at least 82%, at least 83%, at least 84%, at least 85%, at least 86%, at least 87%, at least 88%, at least 89%, at least 90%, at least 91%, at least 92%, at least 93%, at least 94%, at least 95%, at least 96%, at least 97%, at least 98%, or at least 99% sequence identity to SEQ ID NO: 1, provided that the amino acid sequence comprises mutations of K93D, S128A, D139E, K150E, L153P, N162E, H174E, G199P, N219G, K229E, E241D, H275Y, R282G, K324I, F333N, 177_183KEYQSNKdelinsRDNRDN (SEQ ID NOs: 920 and 919), wherein the positions correspond to SEQ ID NO: 1, and provided that the amino acid sequence comprises a cysteine (C) at a position in the polypeptide that corresponds to position 125 of SEQ ID NO: 1, a histidine (H) at a position in the polypeptide that corresponds to position 283 of SEQ ID NO: 1, an aspartic acid (D) at a position in the polypeptide that corresponds to position 305 of SEQ ID NO: 1, an aspartic acid (D) at a position in the polypeptide that corresponds to position 307 of SEQ ID NO: 1, and/or a lysine (K) at a position in the polypeptide that corresponds to position 115 of SEQ ID NO: 1. In some embodiments, the polypeptide having protease activity comprises an amino acid sequence having at least 50%, at least 60%, at least 70%, at least 80%, at least 81%, at least 82%, at least 83%, at least 84%, at least 85%, at least 86%, at least 87%, at least 88%, at least 89%, at least 90%, at least 91%, at least 92%, at least 93%, at least 94%, at least 95%, at least 96%, at least 97%, at least 98%, or at least 99% sequence identity to SEQ ID NO: 1, provided that the amino acid sequence comprises mutations of K93D, S128A, K150E, L153P, N162E, H174E, G199P, N219G, K229E, H275Y, R282G, K324I, F333N, A343K, R360L, 177_183KEYQSNKdelinsRDNRDN (SEQ ID NOs: 920 and 919), wherein the positions correspond to SEQ ID NO: 1, and provided that the amino acid sequence comprises a cysteine (C) at a position in the polypeptide that corresponds to position 125 of SEQ ID NO: 1, a histidine (H) at a position in the polypeptide that corresponds to position 283 of SEQ ID NO: 1, an aspartic acid (D) at a position in the polypeptide that corresponds to position 305 of SEQ ID NO: 1, an aspartic acid (D) at a position in the polypeptide that corresponds to position 307 of SEQ ID NO: 1, and/or a lysine (K) at a position in the polypeptide that corresponds to position 115 of SEQ ID NO: 1. In some embodiments, the polypeptide having protease activity comprises an amino acid sequence having at least 50%, at least 60%, at least 70%, at least 80%, at least 81%, at least 82%, at least 83%, at least 84%, at least 85%, at least 86%, at least 87%, at least 88%, at least 89%, at least 90%, at least 91%, at least 92%, at least 93%, at least 94%, at least 95%, at least 96%, at least 97%, at least 98%, or at least 99% sequence identity to SEQ ID NO: 1, provided that the amino acid sequence comprises mutations of S128A, L153P, N162E, H174E, G199P, N219G, K229E, I262K, H275Y, R282G, K324I, F333N, 177_183KEYQSNKdelinsRDNRDN (SEQ ID NOs: 920 and 919), wherein the positions correspond to SEQ ID NO: 1, and provided that the amino acid sequence comprises a cysteine (C) at a position in the polypeptide that corresponds to position 125 of SEQ ID NO: 1, a histidine (H) at a position in the polypeptide that corresponds to position 283 of SEQ ID NO: 1, an aspartic acid (D) at a position in the polypeptide that corresponds to position 305 of SEQ ID NO: 1, an aspartic acid (D) at a position in the polypeptide that corresponds to position 307 of SEQ ID NO: 1, and/or a lysine (K) at a position in the polypeptide that corresponds to position 115 of SEQ ID NO: 1. In some embodiments, the polypeptide having protease activity comprises an amino acid sequence having at least 50%, at least 60%, at least 70%, at least 80%, at least 81%, at least 82%, at least 83%, at least 84%, at least 85%, at least 86%, at least 87%, at least 88%, at least 89%, at least 90%, at least 91%, at least 92%, at least 93%, at least 94%, at least 95%, at least 96%, at least 97%, at least 98%, or at least 99% sequence identity to SEQ ID NO: 1, provided that the amino acid sequence comprises mutations of K93D, S128A, K150E, L153P, N162E, H174E, G199P, N219G, K229E, I262K, H275Y, R282G, K324I, F333N, 177_183KEYQSNKdelinsRDNRDN (SEQ ID NOs: 920 and 919), wherein the positions correspond to SEQ ID NO: 1, and provided that the amino acid sequence comprises a cysteine (C) at a position in the polypeptide that corresponds to position 125 of SEQ ID NO: 1, a histidine (H) at a position in the polypeptide that corresponds to position 283 of SEQ ID NO: 1, an aspartic acid (D) at a position in the polypeptide that corresponds to position 305 of SEQ ID NO: 1, an aspartic acid (D) at a position in the polypeptide that corresponds to position 307 of SEQ ID NO: 1, and/or a lysine (K) at a position in the polypeptide that corresponds to position 115 of SEQ ID NO: 1. In some embodiments, the polypeptide having protease activity comprises an amino acid sequence having at least 50%, at least 60%, at least 70%, at least 80%, at least 81%, at least 82%, at least 83%, at least 84%, at least 85%, at least 86%, at least 87%, at least 88%, at least 89%, at least 90%, at least 91%, at least 92%, at least 93%, at least 94%, at least 95%, at least 96%, at least 97%, at least 98%, or at least 99% sequence identity to SEQ ID NO: 1, provided that the amino acid sequence comprises mutations of S128A, D139E, L153P, N162E, H174E, G199P, N219G, K229E, E241D, I262K, H275Y, R282G, K324I, F333N, 177_183KEYQSNKdelinsRDNRDN (SEQ ID NOs: 920 and 919), wherein the positions correspond to SEQ ID NO: 1, and provided that the amino acid sequence comprises a cysteine (C) at a position in the polypeptide that corresponds to position 125 of SEQ ID NO: 1, a histidine (H) at a position in the polypeptide that corresponds to position 283 of SEQ ID NO: 1, an aspartic acid (D) at a position in the polypeptide that corresponds to position 305 of SEQ ID NO: 1, an aspartic acid (D) at a position in the polypeptide that corresponds to position 307 of SEQ ID NO: 1, and/or a lysine (K) at a position in the polypeptide that corresponds to position 115 of SEQ ID NO: 1. In some embodiments, the polypeptide having protease activity comprises an amino acid sequence having at least 50%, at least 60%, at least 70%, at least 80%, at least 81%, at least 82%, at least 83%, at least 84%, at least 85%, at least 86%, at least 87%, at least 88%, at least 89%, at least 90%, at least 91%, at least 92%, at least 93%, at least 94%, at least 95%, at least 96%, at least 97%, at least 98%, or at least 99% sequence identity to SEQ ID NO: 1, provided that the amino acid sequence comprises mutations of S128A, L153P, N162E, H174E, G199P, N219G, K229E, I262K, H275Y, R282G, K324I, F333N, A343K, R360L, 177_183KEYQSNKdelinsRDNRDN (SEQ ID NOs: 920 and 919), wherein the positions correspond to SEQ ID NO: 1, and provided that the amino acid sequence comprises a cysteine (C) at a position in the polypeptide that corresponds to position 125 of SEQ ID NO: 1, a histidine (H) at a position in the polypeptide that corresponds to position 283 of SEQ ID NO: 1, an aspartic acid (D) at a position in the polypeptide that corresponds to position 305 of SEQ ID NO: 1, an aspartic acid (D) at a position in the polypeptide that corresponds to position 307 of SEQ ID NO: 1, and/or a lysine (K) at a position in the polypeptide that corresponds to position 115 of SEQ ID NO: 1. In some embodiments, the polypeptide having protease activity comprises an amino acid sequence having at least 50%, at least 60%, at least 70%, at least 80%, at least 81%, at least 82%, at least 83%, at least 84%, at least 85%, at least 86%, at least 87%, at least 88%, at least 89%, at least 90%, at least 91%, at least 92%, at least 93%, at least 94%, at least 95%, at least 96%, at least 97%, at least 98%, or at least 99% sequence identity to SEQ ID NO: 1, provided that the amino acid sequence comprises mutations of S128A, D139E, L153P, N162E, H174E, G199P, N219G, K229E, E241D, I262K, H275Y, R282G, K324I, F333N, A343K, R360L, 177_183KEYQSNKdelinsRDNRDN (SEQ ID NOs: 920 and 919), wherein the positions correspond to SEQ ID NO: 1, and provided that the amino acid sequence comprises a cysteine (H) at a position in the polypeptide that corresponds to position 283 of SEQ ID NO: 1, an aspartic acid (D) at a position in the polypeptide that corresponds to position 305 of SEQ ID NO: 1, an aspartic acid (D) at a position in the polypeptide that corresponds to position 307 of SEQ ID NO: 1, and/or a lysine (K) at a position in the polypeptide that corresponds to position 115 of SEQ ID NO: 1. In some embodiments, the polypeptide having protease activity comprises an amino acid sequence having at least 50%, at least 60%, at least 70%, at least 80%, at least 81%, at least 82%, at least 83%, at least 84%, at least 85%, at least 86%, at least 87%, at least 88%, at least 89%, at least 90%, at least 91%, at least 92%, at least 93%, at least 94%, at least 95%, at least 96%, at least 97%, at least 98%, or at least 99% sequence identity to SEQ ID NO: 1, provided that the amino acid sequence comprises mutations of K93D, S128A, D139E, K150E, L153P, N162E, H174E, G199P, N219G, K229E, E241D, I262K, H275Y, R282G, K324I, F333N, 177_183KEYQSNKdelinsRDNRDN (SEQ ID NOs: 920 and 919), wherein the positions correspond to SEQ ID NO: 1, and provided that the amino acid sequence comprises a cysteine (C) at a position in the polypeptide that corresponds to position 125 of SEQ ID NO: 1, a histidine (H) at a position in the polypeptide that corresponds to position 283 of SEQ ID NO: 1, an aspartic acid (D) at a position in the polypeptide that corresponds to position 305 of SEQ ID NO: 1, an aspartic acid (D) at a position in the polypeptide that corresponds to position 307 of SEQ ID NO: 1, and/or a lysine (K) at a position in the polypeptide that corresponds to position 115 of SEQ ID NO: 1. In some embodiments, the polypeptide having protease activity comprises an amino acid sequence having at least 50%, at least 60%, at least 70%, at least 80%, at least 81%, at least 82%, at least 83%, at least 84%, at least 85%, at least 86%, at least 87%, at least 88%, at least 89%, at least 90%, at least 91%, at least 92%, at least 93%, at least 94%, at least 95%, at least 96%, at least 97%, at least 98%, or at least 99% sequence identity to SEQ ID NO: 1, provided that the amino acid sequence comprises mutations of K93D, S128A, K150E, L153P, N162E, H174E, G199P, N219G, K229E, 1262K, H275Y, R282G, K324I, F333N, A343K, R360L, 177_183KEYQSNKdelinsRDNRDN (SEQ ID NOs: 920 and 919), wherein the positions correspond to SEQ ID NO: 1, and provided that the amino acid sequence comprises a cysteine (C) at a position in the polypeptide that corresponds to position 125 of SEQ ID NO: 1, a histidine (H) at a position in the polypeptide that corresponds to position 283 of SEQ ID NO: 1, an aspartic acid (D) at a position in the polypeptide that corresponds to position 305 of SEQ ID NO: 1, an aspartic acid (D) at a position in the polypeptide that corresponds to position 307 of SEQ ID NO: 1, and/or a lysine (K) at a position in the polypeptide that corresponds to position 115 of SEQ ID NO: 1. In some embodiments, the polypeptide having protease activity comprises an amino acid sequence having at least 50%, at least 60%, at least 70%, at least 80%, at least 81%, at least 82%, at least 83%, at least 84%, at least 85%, at least 86%, at least 87%, at least 88%, at least 89%, at least 90%, at least 91%, at least 92%, at least 93%, at least 94%, at least 95%, at least 96%, at least 97%, at least 98%, or at least 99% sequence identity to SEQ ID NO: 1, provided that the amino acid sequence comprises mutations of K93D, S128A, D139E, K150E, L153P, N162E, H174E, G199P, N219G, K229E, E241D, I262K, H275Y, R282G, S306P, K324I, F333N, 177_183KEYQSNKdelinsRDNRDN (SEQ ID NOs: 920 and 919), wherein the positions correspond to SEQ ID NO: 1, and provided that the amino acid sequence comprises a cysteine (C) at a position in the polypeptide that corresponds to position 125 of SEQ ID NO: 1, a histidine (H) at a position in the polypeptide that corresponds to position 283 of SEQ ID NO: 1, an aspartic acid (D) at a position in the polypeptide that corresponds to position 305 of SEQ ID NO: 1, an aspartic acid (D) at a position in the polypeptide that corresponds to position 307 of SEQ ID NO: 1, and/or a lysine (K) at a position in the polypeptide that corresponds to position 115 of SEQ ID NO: 1. In some embodiments, the polypeptide having protease activity comprises an amino acid sequence having at least 50%, at least 60%, at least 70%, at least 80%, at least 81%, at least 82%, at least 83%, at least 84%, at least 85%, at least 86%, at least 87%, at least 88%, at least 89%, at least 90%, at least 91%, at least 92%, at least 93%, at least 94%, at least 95%, at least 96%, at least 97%, at least 98%, or at least 99% sequence identity to SEQ ID NO: 1, provided that the amino acid sequence comprises mutations of K93D, S128A, K150E, L153P, N162E, H174E, G199P, N219G, K229E, I262K, H275Y, R282G, S306P, K324I, F333N, A343K, R360L, 177_183KEYQSNKdelinsRDNRDN (SEQ ID NOs: 920 and 919), wherein the positions correspond to SEQ ID NO: 1, and provided that the amino acid sequence comprises a cysteine (C) at a position in the polypeptide that corresponds to position 125 of SEQ ID NO: 1, a histidine (H) at a position in the polypeptide that corresponds to position 283 of SEQ ID NO: 1, an aspartic acid (D) at a position in the polypeptide that corresponds to position 305 of SEQ ID NO: 1, an aspartic acid (D) at a position in the polypeptide that corresponds to position 307 of SEQ ID NO: 1, and/or a lysine (K) at a position in the polypeptide that corresponds to position 115 of SEQ ID NO: 1. In some embodiments, the polypeptide having protease activity comprises an amino acid sequence having at least 50%, at least 60%, at least 70%, at least 80%, at least 81%, at least 82%, at least 83%, at least 84%, at least 85%, at least 86%, at least 87%, at least 88%, at least 89%, at least 90%, at least 91%, at least 92%, at least 93%, at least 94%, at least 95%, at least 96%, at least 97%, at least 98%, or at least 99% sequence identity to SEQ ID NO: 1, provided that the amino acid sequence comprises mutations of K93D, S128A, D139E, K150E, L153P, N162E, H174E, G199P, N219G, K229E, E241D, I262K, H275Y, R282G, S306P, K324I, F333N, A343K, R360L, 177_183KEYQSNKdelinsRDNRDN (SEQ ID NOs: 920 and 919), wherein the positions correspond to SEQ ID NO: 1, and provided that the amino acid sequence comprises a cysteine (C) at a position in the polypeptide that corresponds to position 125 of SEQ ID NO: 1, a histidine (H) at a position in the polypeptide that corresponds to position 283 of SEQ ID NO: 1, an aspartic acid (D) at a position in the polypeptide that corresponds to position 305 of SEQ ID NO: 1, an aspartic acid (D) at a position in the polypeptide that corresponds to position 307 of SEQ ID NO: 1, and/or a lysine (K) at a position in the polypeptide that corresponds to position 115 of SEQ ID NO: 1. In some embodiments, the polypeptide having protease activity comprises an amino acid sequence having at least 50%, at least 60%, at least 70%, at least 80%, at least 81%, at least 82%, at least 83%, at least 84%, at least 85%, at least 86%, at least 87%, at least 88%, at least 89%, at least 90%, at least 91%, at least 92%, at least 93%, at least 94%, at least 95%, at least 96%, at least 97%, at least 98%, or at least 99% sequence identity to SEQ ID NO: 1, provided that the amino acid sequence comprises mutations of K93D, S128A, K150E, L153P, N162E, H174E, G199P, N219G, K229E, I262K, H275Y, R282G, K324I, F333E, 177_183KEYQSNKdelinsRDNRDN (SEQ ID NOs: 920 and 919), wherein the positions correspond to SEQ ID NO: 1, and provided that the amino acid sequence comprises a cysteine (C) at a position in the polypeptide that corresponds to position 125 of SEQ ID NO: 1, a histidine (H) at a position in the polypeptide that corresponds to position 283 of SEQ ID NO: 1, an aspartic acid (D) at a position in the polypeptide that corresponds to position 305 of SEQ ID NO: 1, an aspartic acid (D) at a position in the polypeptide that corresponds to position 307 of SEQ ID NO: 1, and/or a lysine (K) at a position in the polypeptide that corresponds to position 115 of SEQ ID NO: 1. In some embodiments, the polypeptide having protease activity comprises an amino acid sequence having at least 50%, at least 60%, at least 70%, at least 80%, at least 81%, at least 82%, at least 83%, at least 84%, at least 85%, at least 86%, at least 87%, at least 88%, at least 89%, at least 90%, at least 91%, at least 92%, at least 93%, at least 94%, at least 95%, at least 96%, at least 97%, at least 98%, or at least 99% sequence identity to SEQ ID NO: 1, provided that the amino acid sequence comprises mutations of K93D, S128A, D139E, K150E, L153P, N162E, H174E, G199P, N219G, K229E, E241D, I262K, H275Y, R282G, K324I, F333E, 177_183KEYQSNKdelinsRDNRDN (SEQ ID NOs: 920 and 919), wherein the positions correspond to SEQ ID NO: 1, and provided that the amino acid sequence comprises a cysteine (C) at a position in the polypeptide that corresponds to position 125 of SEQ ID NO: 1, a histidine (H) at a position in the polypeptide that corresponds to position 283 of SEQ ID NO: 1, an aspartic acid (D) at a position in the polypeptide that corresponds to position 305 of SEQ ID NO: 1, an aspartic acid (D) at a position in the polypeptide that corresponds to position 307 of SEQ ID NO: 1, and/or a lysine (K) at a position in the polypeptide that corresponds to position 115 of SEQ ID NO: 1. In some embodiments, the polypeptide having protease activity comprises an amino acid sequence having at least 50%, at least 60%, at least 70%, at least 80%, at least 81%, at least 82%, at least 83%, at least 84%, at least 85%, at least 86%, at least 87%, at least 88%, at least 89%, at least 90%, at least 91%, at least 92%, at least 93%, at least 94%, at least 95%, at least 96%, at least 97%, at least 98%, or at least 99% sequence identity to SEQ ID NO: 1, provided that the amino acid sequence comprises mutations of K93D, S128A, D139E, K150E, L153P, N162E, H174E, G199P, N219G, K229E, E241D, I262K, H275Y, R282G, K324I, F333E, A343K, R360L, 177_183KEYQSNKdelinsRDNRDN (SEQ ID NOs: 920 and 919), wherein the positions correspond to SEQ ID NO: 1, and provided that the amino acid sequence comprises a cysteine (C) at a position in the polypeptide that corresponds to position 125 of SEQ ID NO: 1, a histidine (H) at a position in the polypeptide that corresponds to position 283 of SEQ ID NO: 1, an aspartic acid (D) at a position in the polypeptide that corresponds to position 305 of SEQ ID NO: 1, an aspartic acid (D) at a position in the polypeptide that corresponds to position 307 of SEQ ID NO: 1, and/or a lysine (K) at a position in the polypeptide that corresponds to position 115 of SEQ ID NO: 1. In some embodiments, the polypeptide having protease activity comprises an amino acid sequence having at least 50%, at least 60%, at least 70%, at least 80%, at least 81%, at least 82%, at least 83%, at least 84%, at least 85%, at least 86%, at least 87%, at least 88%, at least 89%, at least 90%, at least 91%, at least 92%, at least 93%, at least 94%, at least 95%, at least 96%, at least 97%, at least 98%, or at least 99% sequence identity to SEQ ID NO: 1, provided that the amino acid sequence comprises mutations of K93D, S128A, D139E, K150E, L153P, N162E, H174E, G199P, N219G, K229E, E241D, I262K, H275Y, R282G, S306P, K324I, F333E, 177_183KEYQSNKdelinsRDNRDN (SEQ ID NOs: 920 and 919), wherein the positions correspond to SEQ ID NO: 1, and provided that the amino acid sequence comprises a cysteine (C) at a position in the polypeptide that corresponds to position 125 of SEQ ID NO: 1, a histidine (H) at a position in the polypeptide that corresponds to position 283 of SEQ ID NO: 1, an aspartic acid (D) at a position in the polypeptide that corresponds to position 305 of SEQ ID NO: 1, an aspartic acid (D) at a position in the polypeptide that corresponds to position 307 of SEQ ID NO: 1, and/or a lysine (K) at a position in the polypeptide that corresponds to position 115 of SEQ ID NO: 1. In some embodiments, the polypeptide having protease activity comprises an amino acid sequence having at least 50%, at least 60%, at least 70%, at least 80%, at least 81%, at least 82%, at least 83%, at least 84%, at least 85%, at least 86%, at least 87%, at least 88%, at least 89%, at least 90%, at least 91%, at least 92%, at least 93%, at least 94%, at least 95%, at least 96%, at least 97%, at least 98%, or at least 99% sequence identity to SEQ ID NO: 1, provided that the amino acid sequence comprises mutations of K93D, S128A, K150E, L153P, N162E, H174E, G199P, N219G, K229E, I262K, H275Y, R282G, S306P, K324I, F333E, A343K, R360L, 177_183KEYQSNKdelinsRDNRDN (SEQ ID NOs: 920 and 919), wherein the positions correspond to SEQ ID NO: 1, and provided that the amino acid sequence comprises a cysteine (C) at a position in the polypeptide that corresponds to position 125 of SEQ ID NO: 1, a histidine (H) at a position in the polypeptide that corresponds to position 283 of SEQ ID NO: 1, an aspartic acid (D) at a position in the polypeptide that corresponds to position 305 of SEQ ID NO: 1, an aspartic acid (D) at a position in the polypeptide that corresponds to position 307 of SEQ ID NO: 1, and/or a lysine (K) at a position in the polypeptide that corresponds to position 115 of SEQ ID NO: 1. In some embodiments, the polypeptide having protease activity comprises an amino acid sequence having at least 50%, at least 60%, at least 70%, at least 80%, at least 81%, at least 82%, at least 83%, at least 84%, at least 85%, at least 86%, at least 87%, at least 88%, at least 89%, at least 90%, at least 91%, at least 92%, at least 93%, at least 94%, at least 95%, at least 96%, at least 97%, at least 98%, or at least 99% sequence identity to SEQ ID NO: 1, provided that the amino acid sequence comprises mutations of K93D, S128A, D139E, K150E, L153P, N162E, H174E, G199P, N219G, K229E, E241D, I262K, H275Y, R282G, S306P, K324I, F333E, A343K, R360L, 177_183KEYQSNKdelinsRDNRDN (SEQ ID NOs: 920 and 919), wherein the positions correspond to SEQ ID NO: 1, and provided that the amino acid sequence comprises a cysteine (C) at a position in the polypeptide that corresponds to position 125 of SEQ ID NO: 1, a histidine (H) at a position in the polypeptide that corresponds to position 283 of SEQ ID NO: 1, an aspartic acid (D) at a position in the polypeptide that corresponds to position 305 of SEQ ID NO: 1, an aspartic acid (D) at a position in the polypeptide that corresponds to position 307 of SEQ ID NO: 1, and/or a lysine (K) at a position in the polypeptide that corresponds to position 115 of SEQ ID NO: 1. In some embodiments, the polypeptide having protease activity comprises an amino acid sequence having at least 50%, at least 60%, at least 70%, at least 80%, at least 81%, at least 82%, at least 83%, at least 84%, at least 85%, at least 86%, at least 87%, at least 88%, at least 89%, at least 90%, at least 91%, at least 92%, at least 93%, at least 94%, at least 95%, at least 96%, at least 97%, at least 98%, or at least 99% sequence identity to SEQ ID NO: 1, provided that the amino acid sequence comprises mutations of S128A, L153P, N162E, H174E, G199P, N219G, K229E, H275Y, Y281S, K324I, F333N, 177_183KEYQSNKdelinsRDNRDN (SEQ ID NOs: 920 and 919), wherein the positions correspond to SEQ ID NO: 1, and provided that the amino acid sequence comprises a cysteine (C) at a position in the polypeptide that corresponds to position 125 of SEQ ID NO: 1, a histidine (H) at a position in the polypeptide that corresponds to position 283 of SEQ ID NO: 1, an aspartic acid (D) at a position in the polypeptide that corresponds to position 305 of SEQ ID NO: 1, an aspartic acid (D) at a position in the polypeptide that corresponds to position 307 of SEQ ID NO: 1, and/or a lysine (K) at a position in the polypeptide that corresponds to position 115 of SEQ ID NO: 1. In some embodiments, the polypeptide having protease activity comprises an amino acid sequence having at least 50%, at least 60%, at least 70%, at least 80%, at least 81%, at least 82%, at least 83%, at least 84%, at least 85%, at least 86%, at least 87%, at least 88%, at least 89%, at least 90%, at least 91%, at least 92%, at least 93%, at least 94%, at least 95%, at least 96%, at least 97%, at least 98%, or at least 99% sequence identity to SEQ ID NO: 1, provided that the amino acid sequence comprises mutations of K93D, S128A, K150E, L153P, N162E, H174E, G199P, N219G, K229E, H275Y, Y281S, K324I, F333N, 177_183KEYQSNKdelinsRDNRDN (SEQ ID NOs: 920 and 919), wherein the positions correspond to SEQ ID NO: 1, and provided that the amino acid sequence comprises a cysteine (C) at a position in the polypeptide that corresponds to position 125 of SEQ ID NO: 1, a histidine (H) at a position in the polypeptide that corresponds to position 283 of SEQ ID NO: 1, an aspartic acid (D) at a position in the polypeptide that corresponds to position 305 of SEQ ID NO: 1, an aspartic acid (D) at a position in the polypeptide that corresponds to position 307 of SEQ ID NO: 1, and/or a lysine (K) at a position in the polypeptide that corresponds to position 115 of SEQ ID NO: 1. In some embodiments, the polypeptide having protease activity comprises an amino acid sequence having at least 50%, at least 60%, at least 70%, at least 80%, at least 81%, at least 82%, at least 83%, at least 84%, at least 85%, at least 86%, at least 87%, at least 88%, at least 89%, at least 90%, at least 91%, at least 92%, at least 93%, at least 94%, at least 95%, at least 96%, at least 97%, at least 98%, or at least 99% sequence identity to SEQ ID NO: 1, provided that the amino acid sequence comprises mutations of S128A, D139E, L153P, N162E, H174E, G199P, N219G, K229E, E241D, H275Y, Y281S, K324I, F333N, 177_183KEYQSNKdelinsRDNRDN (SEQ ID NOs: 920 and 919), wherein the positions correspond to SEQ ID NO: 1, and provided that the amino acid sequence comprises a cysteine (C) at a position in the polypeptide that corresponds to position 125 of SEQ ID NO: 1, a histidine (H) at a position in the polypeptide that corresponds to position 283 of SEQ ID NO: 1, an aspartic acid (D) at a position in the polypeptide that corresponds to position 305 of SEQ ID NO: 1, an aspartic acid (D) at a position in the polypeptide that corresponds to position 307 of SEQ ID NO: 1, and/or a lysine (K) at a position in the polypeptide that corresponds to position 115 of SEQ ID NO: 1. In some embodiments, the polypeptide having protease activity comprises an amino acid sequence having at least 50%, at least 60%, at least 70%, at least 80%, at least 81%, at least 82%, at least 83%, at least 84%, at least 85%, at least 86%, at least 87%, at least 88%, at least 89%, at least 90%, at least 91%, at least 92%, at least 93%, at least 94%, at least 95%, at least 96%, at least 97%, at least 98%, or at least 99% sequence identity to SEQ ID NO: 1, provided that the amino acid sequence comprises mutations of S128A, L153P, N162E, H174E, G199P, N219G, K229E, H275Y, Y281S, K324I, F333N, A343K, R360L, 177_183KEYQSNKdelinsRDNRDN (SEQ ID NOs: 920 and 919), wherein the positions correspond to SEQ ID NO: 1, and provided that the amino acid sequence comprises a cysteine (C) at a position in the polypeptide that corresponds to position 125 of SEQ ID NO: 1, a histidine (H) at a position in the polypeptide that corresponds to position 283 of SEQ ID NO: 1, an aspartic acid (D) at a position in the polypeptide that corresponds to position 305 of SEQ ID NO: 1, an aspartic acid (D) at a position in the polypeptide that corresponds to position 307 of SEQ ID NO: 1, and/or a lysine (K) at a position in the polypeptide that corresponds to position 115 of SEQ ID NO: 1. In some embodiments, the polypeptide having protease activity comprises an amino acid sequence having at least 50%, at least 60%, at least 70%, at least 80%, at least 81%, at least 82%, at least 83%, at least 84%, at least 85%, at least 86%, at least 87%, at least 88%, at least 89%, at least 90%, at least 91%, at least 92%, at least 93%, at least 94%, at least 95%, at least 96%, at least 97%, at least 98%, or at least 99% sequence identity to SEQ ID NO: 1, provided that the amino acid sequence comprises mutations of S128A, D139E, L153P, N162E, H174E, G199P, N219G, K229E, E241D, H275Y, Y281S, K324I, F333N, A343K, R360L, 177_183KEYQSNKdelinsRDNRDN (SEQ ID NOs: 920 and 919), wherein the positions correspond to SEQ ID NO: 1, and provided that the amino acid sequence comprises a cysteine (C) at a position in the polypeptide that corresponds to position 125 of SEQ ID NO: 1, a histidine (H) at a position in the polypeptide that corresponds to position 283 of SEQ ID NO: 1, an aspartic acid (D) at a position in the polypeptide that corresponds to position 305 of SEQ ID NO: 1, an aspartic acid (D) at a position in the polypeptide that corresponds to position 307 of SEQ ID NO: 1, and/or a lysine (K) at a position in the polypeptide that corresponds to position 115 of SEQ ID NO: 1. In some embodiments, the polypeptide having protease activity comprises an amino acid sequence having at least 50%, at least 60%, at least 70%, at least 80%, at least 81%, at least 82%, at least 83%, at least 84%, at least 85%, at least 86%, at least 87%, at least 88%, at least 89%, at least 90%, at least 91%, at least 92%, at least 93%, at least 94%, at least 95%, at least 96%, at least 97%, at least 98%, or at least 99% sequence identity to SEQ ID NO: 1, provided that the amino acid sequence comprises mutations of K93D, S128A, D139E, K150E, L153P, N162E, H174E, G199P, N219G, K229E, E241D, H275Y, Y281S, K324I, F333N, 177_183KEYQSNKdelinsRDNRDN (SEQ ID NOs: 920 and 919), wherein the positions correspond to SEQ ID NO: 1, and provided that the amino acid sequence comprises a cysteine (C) at a position in the polypeptide that corresponds to position 125 of SEQ ID NO: 1, a histidine (H) at a position in the polypeptide that corresponds to position 283 of SEQ ID NO: 1, an aspartic acid (D) at a position in the polypeptide that corresponds to position 305 of SEQ ID NO: 1, an aspartic acid (D) at a position in the polypeptide that corresponds to position 307 of SEQ ID NO: 1, and/or a lysine (K) at a position in the polypeptide that corresponds to position 115 of SEQ ID NO: 1. In some embodiments, the polypeptide having protease activity comprises an amino acid sequence having at least 50%, at least 60%, at least 70%, at least 80%, at least 81%, at least 82%, at least 83%, at least 84%, at least 85%, at least 86%, at least 87%, at least 88%, at least 89%, at least 90%, at least 91%, at least 92%, at least 93%, at least 94%, at least 95%, at least 96%, at least 97%, at least 98%, or at least 99% sequence identity to SEQ ID NO: 1, provided that the amino acid sequence comprises mutations of K93D, S128A, K150E, L153P, N162E, H174E, G199P, N219G, K229E, H275Y, Y281S, K324I, F333N, A343K, R360L, 177_183KEYQSNKdelinsRDNRDN (SEQ ID NOs: 920 and 919), wherein the positions correspond to SEQ ID NO: 1, and provided that the amino acid sequence comprises a cysteine (C) at a position in the polypeptide that corresponds to position 125 of SEQ ID NO: 1, a histidine (H) at a position in the polypeptide that corresponds to position 283 of SEQ ID NO: 1, an aspartic acid (D) at a position in the polypeptide that corresponds to position 305 of SEQ ID NO: 1, an aspartic acid (D) at a position in the polypeptide that corresponds to position 307 of SEQ ID NO: 1, and/or a lysine (K) at a position in the polypeptide that corresponds to position 115 of SEQ ID NO: 1. In some embodiments, the polypeptide having protease activity comprises an amino acid sequence having at least 50%, at least 60%, at least 70%, at least 80%, at least 81%, at least 82%, at least 83%, at least 84%, at least 85%, at least 86%, at least 87%, at least 88%, at least 89%, at least 90%, at least 91%, at least 92%, at least 93%, at least 94%, at least 95%, at least 96%, at least 97%, at least 98%, or at least 99% sequence identity to SEQ ID NO: 1, provided that the amino acid sequence comprises mutations of S128A, L153P, N162E, H174E, G199P, N219G, K229E, I262K, H275Y, Y281S, K324I, F333N, 177_183KEYQSNKdelinsRDNRDN (SEQ ID NOs: 920 and 919), wherein the positions correspond to SEQ ID NO: 1, and provided that the amino acid sequence comprises a cysteine (C) at a position in the polypeptide that corresponds to position 125 of SEQ ID NO: 1, a histidine (H) at a position in the polypeptide that corresponds to position 283 of SEQ ID NO: 1, an aspartic acid (D) at a position in the polypeptide that corresponds to position 305 of SEQ ID NO: 1, an aspartic acid (D) at a position in the polypeptide that corresponds to position 307 of SEQ ID NO: 1, and/or a lysine (K) at a position in the polypeptide that corresponds to position 115 of SEQ ID NO: 1. In some embodiments, the polypeptide having protease activity comprises an amino acid sequence having at least 50%, at least 60%, at least 70%, at least 80%, at least 81%, at least 82%, at least 83%, at least 84%, at least 85%, at least 86%, at least 87%, at least 88%, at least 89%, at least 90%, at least 91%, at least 92%, at least 93%, at least 94%, at least 95%, at least 96%, at least 97%, at least 98%, or at least 99% sequence identity to SEQ ID NO: 1, provided that the amino acid sequence comprises mutations of K93D, S128A, K150E, L153P, N162E, H174E, G199P, N219G, K229E, I262K, H275Y, Y281S, K324I, F333N, 177_183KEYQSNKdelinsRDNRDN (SEQ ID NOs: 920 and 919), wherein the positions correspond to SEQ ID NO: 1, and provided that the amino acid sequence comprises a cysteine (C) at a position in the polypeptide that corresponds to position 125 of SEQ ID NO: 1, a histidine (H) at a position in the polypeptide that corresponds to position 283 of SEQ ID NO: 1, an aspartic acid (D) at a position in the polypeptide that corresponds to position 305 of SEQ ID NO: 1, an aspartic acid (D) at a position in the polypeptide that corresponds to position 307 of SEQ ID NO: 1, and/or a lysine (K) at a position in the polypeptide that corresponds to position 115 of SEQ ID NO: 1. In some embodiments, the polypeptide having protease activity comprises an amino acid sequence having at least 50%, at least 60%, at least 70%, at least 80%, at least 81%, at least 82%, at least 83%, at least 84%, at least 85%, at least 86%, at least 87%, at least 88%, at least 89%, at least 90%, at least 91%, at least 92%, at least 93%, at least 94%, at least 95%, at least 96%, at least 97%, at least 98%, or at least 99% sequence identity to SEQ ID NO: 1, provided that the amino acid sequence comprises mutations of S128A, D139E, L153P, N162E, H174E, G199P, N219G, K229E, E241D, I262K, H275Y, Y281S, K324I, F333N, 177_183KEYQSNKdelinsRDNRDN (SEQ ID NOs: 920 and 919), wherein the positions correspond to SEQ ID NO: 1, and provided that the amino acid sequence comprises a cysteine (C) at a position in the polypeptide that corresponds to position 125 of SEQ ID NO: 1, a histidine (H) at a position in the polypeptide that corresponds to position 283 of SEQ ID NO: 1, an aspartic acid (D) at a position in the polypeptide that corresponds to position 305 of SEQ ID NO: 1, an aspartic acid (D) at a position in the polypeptide that corresponds to position 307 of SEQ ID NO: 1, and/or a lysine (K) at a position in the polypeptide that corresponds to position 115 of SEQ ID NO: 1. In some embodiments, the polypeptide having protease activity comprises an amino acid sequence having at least 50%, at least 60%, at least 70%, at least 80%, at least 81%, at least 82%, at least 83%, at least 84%, at least 85%, at least 86%, at least 87%, at least 88%, at least 89%, at least 90%, at least 91%, at least 92%, at least 93%, at least 94%, at least 95%, at least 96%, at least 97%, at least 98%, or at least 99% sequence identity to SEQ ID NO: 1, provided that the amino acid sequence comprises mutations of S128A, L153P, N162E, H174E, G199P, N219G, K229E, I262K, H275Y, Y281S, K324I, F333N, A343K, R360L, 177_183KEYQSNKdelinsRDNRDN (SEQ ID NOs: 920 and 919), wherein the positions correspond to SEQ ID NO: 1, and provided that the amino acid sequence comprises a cysteine ID NO: 1, and/or a lysine (K) at a position in the polypeptide that corresponds to position 115 of SEQ ID NO: 1. In some embodiments, the polypeptide having protease activity comprises an amino acid sequence having at least 50%, at least 60%, at least 70%, at least 80%, at least 81%, at least 82%, at least 83%, at least 84%, at least 85%, at least 86%, at least 87%, at least 88%, at least 89%, at least 90%, at least 91%, at least 92%, at least 93%, at least 94%, at least 95%, at least 96%, at least 97%, at least 98%, or at least 99% sequence identity to SEQ ID NO: 1, provided that the amino acid sequence comprises mutations of S128A, D139E, L153P, N162E, H174E, G199P, N219G, K229E, E241D, I262K, H275Y, Y281S, K324I, F333N, A343K, R360L, 177_183KEYQSNKdelinsRDNRDN (SEQ ID NOs: 920 and 919), wherein the positions correspond to SEQ ID NO: 1, and provided that the amino acid sequence comprises a cysteine (C) at a position in the polypeptide that corresponds to position 125 of SEQ ID NO: 1, a histidine (H) at a position in the polypeptide that corresponds to position 283 of SEQ ID NO: 1, an aspartic acid (D) at a position in the polypeptide that corresponds to position 305 of SEQ ID NO: 1, an aspartic acid (D) at a position in the polypeptide that corresponds to position 307 of SEQ ID NO: 1, and/or a lysine (K) at a position in the polypeptide that corresponds to position 115 of SEQ ID NO: 1. In some embodiments, the polypeptide having protease activity comprises an amino acid sequence having at least 50%, at least 60%, at least 70%, at least 80%, at least 81%, at least 82%, at least 83%, at least 84%, at least 85%, at least 86%, at least 87%, at least 88%, at least 89%, at least 90%, at least 91%, at least 92%, at least 93%, at least 94%, at least 95%, at least 96%, at least 97%, at least 98%, or at least 99% sequence identity to SEQ ID NO: 1, provided that the amino acid sequence comprises mutations of K93D, S128A, D139E, K150E, L153P, N162E, H174E, G199P, N219G, K229E, E241D, I262K, H275Y, Y281S, K324I, F333N, 177_183KEYQSNKdelinsRDNRDN (SEQ ID NOs: 920 and 919), wherein the positions correspond to SEQ ID NO: 1, and provided that the amino acid sequence comprises a cysteine (C) at a position in the polypeptide that corresponds to position 125 of SEQ ID NO: 1, a histidine (H) at a position in the polypeptide that corresponds to position 283 of SEQ ID NO: 1, an aspartic acid (D) at a position in the polypeptide that corresponds to position 305 of SEQ ID NO: 1, an aspartic acid (D) at a position in the polypeptide that corresponds to position 307 of SEQ ID NO: 1, and/or a lysine (K) at a position in the polypeptide that corresponds to position 115 of SEQ ID NO: 1. In some embodiments, the polypeptide having protease activity comprises an amino acid sequence having at least 50%, at least 60%, at least 70%, at least 80%, at least 81%, at least 82%, at least 83%, at least 84%, at least 85%, at least 86%, at least 87%, at least 88%, at least 89%, at least 90%, at least 91%, at least 92%, at least 93%, at least 94%, at least 95%, at least 96%, at least 97%, at least 98%, or at least 99% sequence identity to SEQ ID NO: 1, provided that the amino acid sequence comprises mutations of K93D, S128A, K150E, L153P, N162E, H174E, G199P, N219G, K229E, I262K, H275Y, Y281S, K324I, F333N, A343K, R360L, 177_183KEYQSNKdelinsRDNRDN (SEQ ID NOs: 920 and 919), wherein the positions correspond to SEQ ID NO: 1, and provided that the amino acid sequence comprises a cysteine (C) at a position in the polypeptide that corresponds to position 125 of SEQ ID NO: 1, a histidine (H) at a position in the polypeptide that corresponds to position 283 of SEQ ID NO: 1, an aspartic acid (D) at a position in the polypeptide that corresponds to position 305 of SEQ ID NO: 1, an aspartic acid (D) at a position in the polypeptide that corresponds to position 307 of SEQ ID NO: 1, and/or a lysine (K) at a position in the polypeptide that corresponds to position 115 of SEQ ID NO: 1. In some embodiments, the polypeptide having protease activity comprises an amino acid sequence having at least 50%, at least 60%, at least 70%, at least 80%, at least 81%, at least 82%, at least 83%, at least 84%, at least 85%, at least 86%, at least 87%, at least 88%, at least 89%, at least 90%, at least 91%, at least 92%, at least 93%, at least 94%, at least 95%, at least 96%, at least 97%, at least 98%, or at least 99% sequence identity to SEQ ID NO: 1, provided that the amino acid sequence comprises mutations of K93D, S128A, D139E, K150E, L153P, N162E, H174E, G199P, N219G, K229E, E241D, I262K, H275Y, Y281S, S306P, K324I, F333N, 177_183KEYQSNKdelinsRDNRDN (SEQ ID NOs: 920 and 919), wherein the positions correspond to SEQ ID NO: 1, and provided that the amino acid sequence comprises a cysteine (C) at a position in the polypeptide that corresponds to position 125 of SEQ ID NO: 1, a histidine (H) at a position in the polypeptide that corresponds to position 283 of SEQ ID NO: 1, an aspartic acid (D) at a position in the polypeptide that corresponds to position 305 of SEQ ID NO: 1, an aspartic acid (D) at a position in the polypeptide that corresponds to position 307 of SEQ ID NO: 1, and/or a lysine (K) at a position in the polypeptide that corresponds to position 115 of SEQ ID NO: 1. In some embodiments, the polypeptide having protease activity comprises an amino acid sequence having at least 50%, at least 60%, at least 70%, at least 80%, at least 81%, at least 82%, at least 83%, at least 84%, at least 85%, at least 86%, at least 87%, at least 88%, at least 89%, at least 90%, at least 91%, at least 92%, at least 93%, at least 94%, at least 95%, at least 96%, at least 97%, at least 98%, or at least 99% sequence identity to SEQ ID NO: 1, provided that the amino acid sequence comprises mutations of K93D, S128A, K150E, L153P, N162E, H174E, G199P, N219G, K229E, I262K, H275Y, Y281S, S306P, K324I, F333N, A343K, R360L, 177_183KEYQSNKdelinsRDNRDN (SEQ ID NOs: 920 and 919), wherein the positions correspond to SEQ ID NO: 1, and provided that the amino acid sequence comprises a cysteine (C) at a position in the polypeptide that corresponds to position 125 of SEQ ID NO: 1, a histidine (H) at a position in the polypeptide that corresponds to position 283 of SEQ ID NO: 1, an aspartic acid (D) at a position in the polypeptide that corresponds to position 305 of SEQ ID NO: 1, an aspartic acid (D) at a position in the polypeptide that corresponds to position 307 of SEQ ID NO: 1, and/or a lysine (K) at a position in the polypeptide that corresponds to position 115 of SEQ ID NO: 1. In some embodiments, the polypeptide having protease activity comprises an amino acid sequence having at least 50%, at least 60%, at least 70%, at least 80%, at least 81%, at least 82%, at least 83%, at least 84%, at least 85%, at least 86%, at least 87%, at least 88%, at least 89%, at least 90%, at least 91%, at least 92%, at least 93%, at least 94%, at least 95%, at least 96%, at least 97%, at least 98%, or at least 99% sequence identity to SEQ ID NO: 1, provided that the amino acid sequence comprises mutations of K93D, S128A, D139E, K150E, L153P, N162E, H174E, G199P, N219G, K229E, E241D, I262K, H275Y, Y281S, S306P, K324I, F333N, A343K, R360L, 177_183KEYQSNKdelinsRDNRDN (SEQ ID NOs: 920 and 919), wherein the positions correspond to SEQ ID NO: 1, and provided that the amino acid sequence comprises a cysteine (C) at a position in the polypeptide that corresponds to position 125 of SEQ ID NO: 1, a histidine (H) at a position in the polypeptide that corresponds to position 283 of SEQ ID NO: 1, an aspartic acid (D) at a position in the polypeptide that corresponds to position 305 of SEQ ID NO: 1, an aspartic acid (D) at a position in the polypeptide that corresponds to position 307 of SEQ ID NO: 1, and/or a lysine (K) at a position in the polypeptide that corresponds to position 115 of SEQ ID NO: 1. In some embodiments, the polypeptide having protease activity comprises an amino acid sequence having at least 50%, at least 60%, at least 70%, at least 80%, at least 81%, at least 82%, at least 83%, at least 84%, at least 85%, at least 86%, at least 87%, at least 88%, at least 89%, at least 90%, at least 91%, at least 92%, at least 93%, at least 94%, at least 95%, at least 96%, at least 97%, at least 98%, or at least 99% sequence identity to SEQ ID NO: 1, provided that the amino acid sequence comprises mutations of K93D, S128A, K150E, L153P, N162E, H174E, G199P, N219G, K229E, I262K, H275Y, Y281S, K324I, F333E, 177_183KEYQSNKdelinsRDNRDN (SEQ ID NOs: 920 and 919), wherein the positions correspond to SEQ ID NO: 1, and provided that the amino acid sequence comprises a cysteine (C) at a position in the polypeptide that corresponds to position 125 of SEQ ID NO: 1, a histidine (H) at a position in the polypeptide that corresponds to position 283 of SEQ ID NO: 1, an aspartic acid (D) at a position in the polypeptide that corresponds to position 305 of SEQ ID NO: 1, an aspartic acid (D) at a position in the polypeptide that corresponds to position 307 of SEQ ID NO: 1, and/or a lysine (K) at a position in the polypeptide that corresponds to position 115 of SEQ ID NO: 1. In some embodiments, the polypeptide having protease activity comprises an amino acid sequence having at least 50%, at least 60%, at least 70%, at least 80%, at least 81%, at least 82%, at least 83%, at least 84%, at least 85%, at least 86%, at least 87%, at least 88%, at least 89%, at least 90%, at least 91%, at least 92%, at least 93%, at least 94%, at least 95%, at least 96%, at least 97%, at least 98%, or at least 99% sequence identity to SEQ ID NO: 1, provided that the amino acid sequence comprises mutations of K93D, S128A, D139E, K150E, L153P, N162E, H174E, G199P, N219G, K229E, E241D, I262K, H275Y, Y281S, K324I, F333E, 177_183KEYQSNKdelinsRDNRDN (SEQ ID NOs: 920 and 919), wherein the positions correspond to SEQ ID NO: 1, and provided that the amino acid sequence comprises a cysteine (C) at a position in the polypeptide that corresponds to position 125 of SEQ ID NO: 1, a histidine (H) at a position in the polypeptide that corresponds to position 283 of SEQ ID NO: 1, an aspartic acid (D) at a position in the polypeptide that corresponds to position 305 of SEQ ID NO: 1, an aspartic acid (D) at a position in the polypeptide that corresponds to position 307 of SEQ ID NO: 1, and/or a lysine (K) at a position in the polypeptide that corresponds to position 115 of SEQ ID NO: 1. In some embodiments, the polypeptide having protease activity comprises an amino acid sequence having at least 50%, at least 60%, at least 70%, at least 80%, at least 81%, at least 82%, at least 83%, at least 84%, at least 85%, at least 86%, at least 87%, at least 88%, at least 89%, at least 90%, at least 91%, at least 92%, at least 93%, at least 94%, at least 95%, at least 96%, at least 97%, at least 98%, or at least 99% sequence identity to SEQ ID NO: 1, provided that the amino acid sequence comprises mutations of K93D, S128A, D139E, K150E, L153P, N162E, H174E, G199P, N219G, K229E, E241D, 1262K, H275Y, Y281S, K324I, F333E, A343K, R360L, 177_183KEYQSNKdelinsRDNRDN (SEQ ID NOs: 920 and 919), wherein the positions correspond to SEQ ID NO: 1, and provided that the amino acid sequence comprises a cysteine (C) at a position in the polypeptide that corresponds to position 125 of SEQ ID NO: 1, a histidine (H) at a position in the polypeptide that corresponds to position 283 of SEQ ID NO: 1, an aspartic acid (D) at a position in the polypeptide that corresponds to position 305 of SEQ ID NO: 1, an aspartic acid (D) at a position in the polypeptide that corresponds to position 307 of SEQ ID NO: 1, and/or a lysine (K) at a position in the polypeptide that corresponds to position 115 of SEQ ID NO: 1. In some embodiments, the polypeptide having protease activity comprises an amino acid sequence having at least 50%, at least 60%, at least 70%, at least 80%, at least 81%, at least 82%, at least 83%, at least 84%, at least 85%, at least 86%, at least 87%, at least 88%, at least 89%, at least 90%, at least 91%, at least 92%, at least 93%, at least 94%, at least 95%, at least 96%, at least 97%, at least 98%, or at least 99% sequence identity to SEQ ID NO: 1, provided that the amino acid sequence comprises mutations of K93D, S128A, D139E, K150E, L153P, N162E, H174E, G199P, N219G, K229E, E241D, I262K, H275Y, Y281S, S306P, K324I, F333E, 177_183KEYQSNKdelinsRDNRDN (SEQ ID NOs: 920 and 919), wherein the positions correspond to SEQ ID NO: 1, and provided that the amino acid sequence comprises a cysteine (C) at a position in the polypeptide that corresponds to position 125 of SEQ ID NO: 1, a histidine (H) at a position in the polypeptide that corresponds to position 283 of SEQ ID NO: 1, an aspartic acid (D) at a position in the polypeptide that corresponds to position 305 of SEQ ID NO: 1, an aspartic acid (D) at a position in the polypeptide that corresponds to position 307 of SEQ ID NO: 1, and/or a lysine (K) at a position in the polypeptide that corresponds to position 115 of SEQ ID NO: 1. In some embodiments, the polypeptide having protease activity comprises an amino acid sequence having at least 50%, at least 60%, at least 70%, at least 80%, at least 81%, at least 82%, at least 83%, at least 84%, at least 85%, at least 86%, at least 87%, at least 88%, at least 89%, at least 90%, at least 91%, at least 92%, at least 93%, at least 94%, at least 95%, at least 96%, at least 97%, at least 98%, or at least 99% sequence identity to SEQ ID NO: 1, provided that the amino acid sequence comprises mutations of K93D, S128A, K150E, L153P, N162E, H174E, G199P, N219G, K229E, 1262K, H275Y, Y281S, S306P, K324I, F333E, A343K, R360L, 177_183KEYQSNKdelinsRDNRDN (SEQ ID NOs: 920 and 919), wherein the positions correspond to SEQ ID NO: 1, and provided that the amino acid sequence comprises a cysteine (C) at a position in the polypeptide that corresponds to position 125 of SEQ ID NO: 1, a histidine (H) at a position in the polypeptide that corresponds to position 283 of SEQ ID NO: 1, an aspartic acid (D) at a position in the polypeptide that corresponds to position 305 of SEQ ID NO: 1, an aspartic acid (D) at a position in the polypeptide that corresponds to position 307 of SEQ ID NO: 1, and/or a lysine (K) at a position in the polypeptide that corresponds to position 115 of SEQ ID NO: 1. In some embodiments, the polypeptide having protease activity comprises an amino acid sequence having at least 50%, at least 60%, at least 70%, at least 80%, at least 81%, at least 82%, at least 83%, at least 84%, at least 85%, at least 86%, at least 87%, at least 88%, at least 89%, at least 90%, at least 91%, at least 92%, at least 93%, at least 94%, at least 95%, at least 96%, at least 97%, at least 98%, or at least 99% sequence identity to SEQ ID NO: 1, provided that the amino acid sequence comprises mutations of K93D, S128A, D139E, K150E, L153P, N162E, H174E, G199P, N219G, K229E, E241D, 1262K, H275Y, Y281S, S306P, K324I, F333E, A343K, R360L, 177_183KEYQSNKdelinsRDNRDN (SEQ ID NOs: 920 and 919), wherein the positions correspond to SEQ ID NO: 1, and provided that the amino acid sequence comprises a cysteine (C) at a position in the polypeptide that corresponds to position 125 of SEQ ID NO: 1, a histidine (H) at a position in the polypeptide that corresponds to position 283 of SEQ ID NO: 1, an aspartic acid (D) at a position in the polypeptide that corresponds to position 305 of SEQ ID NO: 1, an aspartic acid (D) at a position in the polypeptide that corresponds to position 307 of SEQ ID NO: 1, and/or a lysine (K) at a position in the polypeptide that corresponds to position 115 of SEQ ID NO: 1. In some embodiments, the polypeptide having protease activity comprises an amino acid sequence having at least 50%, at least 60%, at least 70%, at least 80%, at least 81%, at least 82%, at least 83%, at least 84%, at least 85%, at least 86%, at least 87%, at least 88%, at least 89%, at least 90%, at least 91%, at least 92%, at least 93%, at least 94%, at least 95%, at least 96%, at least 97%, at least 98%, or at least 99% sequence identity to SEQ ID NO: 1, provided that the amino acid sequence comprises mutations of K93D, S128A, K150E, L153P, N162E, H174E, G199P, N219G, K229E, I262K, H275Y, K324I, F333N, 177_183KEYQSNKdelinsRDNRDN (SEQ ID NOs: 920 and 919), wherein the positions correspond to SEQ ID NO: 1, and provided that the amino acid sequence comprises a cysteine (C) at a position in the polypeptide that corresponds to position 125 of SEQ ID NO: 1, a histidine (H) at a position in the polypeptide that corresponds to position 283 of SEQ ID NO: 1, an aspartic acid (D) at a position in the polypeptide that corresponds to position 305 of SEQ ID NO: 1, an aspartic acid (D) at a position in the polypeptide that corresponds to position 307 of SEQ ID NO: 1, and/or a lysine (K) at a position in the polypeptide that corresponds to position 115 of SEQ ID NO: 1. In some embodiments, the polypeptide having protease activity comprises an amino acid sequence having at least 50%, at least 60%, at least 70%, at least 80%, at least 81%, at least 82%, at least 83%, at least 84%, at least 85%, at least 86%, at least 87%, at least 88%, at least 89%, at least 90%, at least 91%, at least 92%, at least 93%, at least 94%, at least 95%, at least 96%, at least 97%, at least 98%, or at least 99% sequence identity to SEQ ID NO: 1, provided that the amino acid sequence comprises mutations of S128A, D139E, L153P, N162E, H174E, G199P, N219G, K229E, E241D, I262K, H275Y, K324I, F333N, 177_183KEYQSNKdelinsRDNRDN (SEQ ID NOs: 920 and 919), wherein the positions correspond to SEQ ID NO: 1, and provided that the amino acid sequence comprises a cysteine (C) at a position in the polypeptide that corresponds to position 125 of SEQ ID NO: 1, a histidine (H) at a position in the polypeptide that corresponds to position 283 of SEQ ID NO: 1, an aspartic acid (D) at a position in the polypeptide that corresponds to position 305 of SEQ ID NO: 1, an aspartic acid (D) at a position in the polypeptide that corresponds to position 307 of SEQ ID NO: 1, and/or a lysine (K) at a position in the polypeptide that corresponds to position 115 of SEQ ID NO: 1. In some embodiments, the polypeptide having protease activity comprises an amino acid sequence having at least 50%, at least 60%, at least 70%, at least 80%, at least 81%, at least 82%, at least 83%, at least 84%, at least 85%, at least 86%, at least 87%, at least 88%, at least 89%, at least 90%, at least 91%, at least 92%, at least 93%, at least 94%, at least 95%, at least 96%, at least 97%, at least 98%, or at least 99% sequence identity to SEQ ID NO: 1, provided that the amino acid sequence comprises mutations of S128A, L153P, N162E, H174E, G199P, N219G, K229E, I262K, H275Y, K324I, F333N, A343K, R360L, 177_183KEYQSNKdelinsRDNRDN (SEQ ID NOs: 920 and 919), wherein the positions correspond to SEQ ID NO: 1, and provided that the amino acid sequence comprises a cysteine (C) at a position in the polypeptide that corresponds to position 125 of SEQ ID NO: 1, a histidine (H) at a position in the polypeptide that corresponds to position 283 of SEQ ID NO: 1, an aspartic acid (D) at a position in the polypeptide that corresponds to position 305 of SEQ ID NO: 1, an aspartic acid (D) at a position in the polypeptide that corresponds to position 307 of SEQ ID NO: 1, and/or a lysine (K) at a position in the polypeptide that corresponds to position 115 of SEQ ID NO: 1. In some embodiments, the polypeptide having protease activity comprises an amino acid sequence having at least 50%, at least 60%, at least 70%, at least 80%, at least 81%, at least 82%, at least 83%, at least 84%, at least 85%, at least 86%, at least 87%, at least 88%, at least 89%, at least 90%, at least 91%, at least 92%, at least 93%, at least 94%, at least 95%, at least 96%, at least 97%, at least 98%, or at least 99% sequence identity to SEQ ID NO: 1, provided that the amino acid sequence comprises mutations of S128A, D139E, L153P, N162E, H174E, G199P, N219G, K229E, E241D, I262K, H275Y, K324I, F333N, A343K, R360L, 177_183KEYQSNKdelinsRDNRDN (SEQ ID NOs: 920 and 919), wherein the positions correspond to SEQ ID NO: 1, and provided that the amino acid sequence comprises a cysteine (C) at a position in the polypeptide that corresponds to position 125 of SEQ ID NO: 1, a histidine (H) at a position in the polypeptide that corresponds to position 283 of SEQ ID NO: 1, an aspartic acid (D) at a position in the polypeptide that corresponds to position 305 of SEQ ID NO: 1, an aspartic acid (D) at a position in the polypeptide that corresponds to position 307 of SEQ ID NO: 1, and/or a lysine (K) at a position in the polypeptide that corresponds to position 115 of SEQ ID NO: 1. In some embodiments, the polypeptide having protease activity comprises an amino acid sequence having at least 50%, at least 60%, at least 70%, at least 80%, at least 81%, at least 82%, at least 83%, at least 84%, at least 85%, at least 86%, at least 87%, at least 88%, at least 89%, at least 90%, at least 91%, at least 92%, at least 93%, at least 94%, at least 95%, at least 96%, at least 97%, at least 98%, or at least 99% sequence identity to SEQ ID NO: 1, provided that the amino acid sequence comprises mutations of K93D, S128A, D139E, K150E, L153P, N162E, H174E, G199P, N219G, K229E, E241D, I262K, H275Y, K324I, F333N, 177_183KEYQSNKdelinsRDNRDN (SEQ ID NOs: 920 and 919), wherein the positions correspond to SEQ ID NO: 1, and provided that the amino acid sequence comprises a cysteine (C) at a position in the polypeptide that corresponds to position 125 of SEQ ID NO: 1, a histidine (H) at a position in the polypeptide that corresponds to position 283 of SEQ ID NO: 1, an aspartic acid (D) at a position in the polypeptide that corresponds to position 305 of SEQ ID NO: 1, an aspartic acid (D) at a position in the polypeptide that corresponds to position 307 of SEQ ID NO: 1, and/or a lysine (K) at a position in the polypeptide that corresponds to position 115 of SEQ ID NO: 1. In some embodiments, the polypeptide having protease activity comprises an amino acid sequence having at least 50%, at least 60%, at least 70%, at least 80%, at least 81%, at least 82%, at least 83%, at least 84%, at least 85%, at least 86%, at least 87%, at least 88%, at least 89%, at least 90%, at least 91%, at least 92%, at least 93%, at least 94%, at least 95%, at least 96%, at least 97%, at least 98%, or at least 99% sequence identity to SEQ ID NO: 1, provided that the amino acid sequence comprises mutations of K93D, S128A, K150E, L153P, N162E, H174E, G199P, N219G, K229E, I262K, H275Y, K324I, F333N, A343K, R360L, 177_183KEYQSNKdelinsRDNRDN (SEQ ID NOs: 920 and 919), wherein the positions correspond to SEQ ID NO: 1, and provided that the amino acid sequence comprises a cysteine (C) at a position in the polypeptide that corresponds to position 125 of SEQ ID NO: 1, a histidine (H) at a position in the polypeptide that corresponds to position 283 of SEQ ID NO: 1, an aspartic acid (D) at a position in the polypeptide that corresponds to position 305 of SEQ ID NO: 1, an aspartic acid (D) at a position in the polypeptide that corresponds to position 307 of SEQ ID NO: 1, and/or a lysine (K) at a position in the polypeptide that corresponds to position 115 of SEQ ID NO: 1. In some embodiments, the polypeptide having protease activity comprises an amino acid sequence having at least 50%, at least 60%, at least 70%, at least 80%, at least 81%, at least 82%, at least 83%, at least 84%, at least 85%, at least 86%, at least 87%, at least 88%, at least 89%, at least 90%, at least 91%, at least 92%, at least 93%, at least 94%, at least 95%, at least 96%, at least 97%, at least 98%, or at least 99% sequence identity to SEQ ID NO: 1, provided that the amino acid sequence comprises mutations of K93D, S128A, D139E, K150E, L153P, N162E, H174E, G199P, N219G, K229E, E241D, I262K, H275Y, S306P, K324I, F333N, 177_183KEYQSNKdelinsRDNRDN (SEQ ID NOs: 920 and 919), wherein the positions correspond to SEQ ID NO: 1, and provided that the amino acid sequence comprises a cysteine (C) at a position in the polypeptide that corresponds to position 125 of SEQ ID NO: 1, a histidine (H) at a position in the polypeptide that corresponds to position 283 of SEQ ID NO: 1, an aspartic acid (D) at a position in the polypeptide that corresponds to position 305 of SEQ ID NO: 1, an aspartic acid (D) at a position in the polypeptide that corresponds to position 307 of SEQ ID NO: 1, and/or a lysine (K) at a position in the polypeptide that corresponds to position 115 of SEQ ID NO: 1. In some embodiments, the polypeptide having protease activity comprises an amino acid sequence having at least 50%, at least 60%, at least 70%, at least 80%, at least 81%, at least 82%, at least 83%, at least 84%, at least 85%, at least 86%, at least 87%, at least 88%, at least 89%, at least 90%, at least 91%, at least 92%, at least 93%, at least 94%, at least 95%, at least 96%, at least 97%, at least 98%, or at least 99% sequence identity to SEQ ID NO: 1, provided that the amino acid sequence comprises mutations of K93D, S128A, K150E, L153P, N162E, H174E, G199P, N219G, K229E, I262K, H275Y, S306P, K324I, F333N, A343K, R360L, 177_183KEYQSNKdelinsRDNRDN (SEQ ID NOs: 920 and 919), wherein the positions correspond to SEQ ID NO: 1, and provided that the amino acid sequence comprises a cysteine aspartic acid (D) at a position in the polypeptide that corresponds to position 305 of SEQ ID NO: 1, an aspartic acid (D) at a position in the polypeptide that corresponds to position 307 of SEQ ID NO: 1, and/or a lysine (K) at a position in the polypeptide that corresponds to position 115 of SEQ ID NO: 1. In some embodiments, the polypeptide having protease activity comprises an amino acid sequence having at least 50%, at least 60%, at least 70%, at least 80%, at least 81%, at least 82%, at least 83%, at least 84%, at least 85%, at least 86%, at least 87%, at least 88%, at least 89%, at least 90%, at least 91%, at least 92%, at least 93%, at least 94%, at least 95%, at least 96%, at least 97%, at least 98%, or at least 99% sequence identity to SEQ ID NO: 1, provided that the amino acid sequence comprises mutations of K93D, S128A, D139E, K150E, L153P, N162E, H174E, G199P, N219G, K229E, E241D, 1262K, H275Y, S306P, K324I, F333N, A343K, R360L, 177_183KEYQSNKdelinsRDNRDN (SEQ ID NOs: 920 and 919), wherein the positions correspond to SEQ ID NO: 1, and provided that the amino acid sequence comprises a cysteine (C) at a position in the polypeptide that corresponds to position 125 of SEQ ID NO: 1, a histidine (H) at a position in the polypeptide that corresponds to position 283 of SEQ ID NO: 1, an aspartic acid (D) at a position in the polypeptide that corresponds to position 305 of SEQ ID NO: 1, an aspartic acid (D) at a position in the polypeptide that corresponds to position 307 of SEQ ID NO: 1, and/or a lysine (K) at a position in the polypeptide that corresponds to position 115 of SEQ ID NO: 1. In some embodiments, the polypeptide having protease activity comprises an amino acid sequence having at least 50%, at least 60%, at least 70%, at least 80%, at least 81%, at least 82%, at least 83%, at least 84%, at least 85%, at least 86%, at least 87%, at least 88%, at least 89%, at least 90%, at least 91%, at least 92%, at least 93%, at least 94%, at least 95%, at least 96%, at least 97%, at least 98%, or at least 99% sequence identity to SEQ ID NO: 1, provided that the amino acid sequence comprises mutations of K93D, S128A, K150E, L153P, N162E, H174E, G199P, N219G, K229E, I262K, H275Y, K324I, F333E, 177_183KEYQSNKdelinsRDNRDN (SEQ ID NOs: 920 and 919), wherein the positions correspond to SEQ ID NO: 1, and provided that the amino acid sequence comprises a cysteine (C) at a position in the polypeptide that corresponds to position 125 of SEQ ID NO: 1, a histidine (H) at a position in the polypeptide that corresponds to position 283 of SEQ ID NO: 1, an aspartic acid (D) at a position in the polypeptide that corresponds to position 305 of SEQ ID NO: 1, an aspartic acid (D) at a position in the polypeptide that corresponds to position 307 of SEQ ID NO: 1, and/or a lysine (K) at a position in the polypeptide that corresponds to position 115 of SEQ ID NO: 1. In some embodiments, the polypeptide having protease activity comprises an amino acid sequence having at least 50%, at least 60%, at least 70%, at least 80%, at least 81%, at least 82%, at least 83%, at least 84%, at least 85%, at least 86%, at least 87%, at least 88%, at least 89%, at least 90%, at least 91%, at least 92%, at least 93%, at least 94%, at least 95%, at least 96%, at least 97%, at least 98%, or at least 99% sequence identity to SEQ ID NO: 1, provided that the amino acid sequence comprises mutations of K93D, S128A, D139E, K150E, L153P, N162E, H174E, G199P, N219G, K229E, E241D, I262K, H275Y, K324I, F333E, 177_183KEYQSNKdelinsRDNRDN (SEQ ID NOs: 920 and 919), wherein the positions correspond to SEQ ID NO: 1, and provided that the amino acid sequence comprises a cysteine (C) at a position in the polypeptide that corresponds to position 125 of SEQ ID NO: 1, a histidine (H) at a position in the polypeptide that corresponds to position 283 of SEQ ID NO: 1, an aspartic acid (D) at a position in the polypeptide that corresponds to position 305 of SEQ ID NO: 1, an aspartic acid (D) at a position in the polypeptide that corresponds to position 307 of SEQ ID NO: 1, and/or a lysine (K) at a position in the polypeptide that corresponds to position 115 of SEQ ID NO: 1. In some embodiments, the polypeptide having protease activity comprises an amino acid sequence having at least 50%, at least 60%, at least 70%, at least 80%, at least 81%, at least 82%, at least 83%, at least 84%, at least 85%, at least 86%, at least 87%, at least 88%, at least 89%, at least 90%, at least 91%, at least 92%, at least 93%, at least 94%, at least 95%, at least 96%, at least 97%, at least 98%, or at least 99% sequence identity to SEQ ID NO: 1, provided that the amino acid sequence comprises mutations of K93D, S128A, D139E, K150E, L153P, N162E, H174E, G199P, N219G, K229E, E241D, I262K, H275Y, K324I, F333E, A343K, R360L, 177_183KEYQSNKdelinsRDNRDN (SEQ ID NOs: 920 and 919), wherein the positions correspond to SEQ ID NO: 1, and provided that the amino acid sequence comprises a cysteine (C) at a position in the polypeptide that corresponds to position 125 of SEQ ID NO: 1, a histidine (H) at a position in the polypeptide that corresponds to position 283 of SEQ ID NO: 1, an aspartic acid (D) at a position in the polypeptide that corresponds to position 305 of SEQ ID NO: 1, an aspartic acid (D) at a position in the polypeptide that corresponds to position 307 of SEQ ID NO: 1, and/or a lysine (K) at a position in the polypeptide that corresponds to position 115 of SEQ ID NO: 1. In some embodiments, the polypeptide having protease activity comprises an amino acid sequence having at least 50%, at least 60%, at least 70%, at least 80%, at least 81%, at least 82%, at least 83%, at least 84%, at least 85%, at least 86%, at least 87%, at least 88%, at least 89%, at least 90%, at least 91%, at least 92%, at least 93%, at least 94%, at least 95%, at least 96%, at least 97%, at least 98%, or at least 99% sequence identity to SEQ ID NO: 1, provided that the amino acid sequence comprises mutations of K93D, S128A, D139E, K150E, L153P, N162E, H174E, G199P, N219G, K229E, E241D, I262K, H275Y, S306P, K324I, F333E, 177_183KEYQSNKdelinsRDNRDN (SEQ ID NOs: 920 and 919), wherein the positions correspond to SEQ ID NO: 1, and provided that the amino acid sequence comprises a cysteine (C) at a position in the polypeptide that corresponds to position 125 of SEQ ID NO: 1, a histidine (H) at a position in the polypeptide that corresponds to position 283 of SEQ ID NO: 1, an aspartic acid (D) at a position in the polypeptide that corresponds to position 305 of SEQ ID NO: 1, an aspartic acid (D) at a position in the polypeptide that corresponds to position 307 of SEQ ID NO: 1, and/or a lysine (K) at a position in the polypeptide that corresponds to position 115 of SEQ ID NO: 1. In some embodiments, the polypeptide having protease activity comprises an amino acid sequence having at least 50%, at least 60%, at least 70%, at least 80%, at least 81%, at least 82%, at least 83%, at least 84%, at least 85%, at least 86%, at least 87%, at least 88%, at least 89%, at least 90%, at least 91%, at least 92%, at least 93%, at least 94%, at least 95%, at least 96%, at least 97%, at least 98%, or at least 99% sequence identity to SEQ ID NO: 1, provided that the amino acid sequence comprises mutations of K93D, S128A, K150E, L153P, N162E, H174E, G199P, N219G, K229E, I262K, H275Y, S306P, K324I, F333E, A343K, R360L, 177_183KEYQSNKdelinsRDNRDN (SEQ ID NOs: 920 and 919), wherein the positions correspond to SEQ ID NO: 1, and provided that the amino acid sequence comprises a cysteine (C) at a position in the polypeptide that corresponds to position 125 of SEQ ID NO: 1, a histidine (H) at a position in the polypeptide that corresponds to position 283 of SEQ ID NO: 1, an aspartic acid (D) at a position in the polypeptide that corresponds to position 305 of SEQ ID NO: 1, an aspartic acid (D) at a position in the polypeptide that corresponds to position 307 of SEQ ID NO: 1, and/or a lysine (K) at a position in the polypeptide that corresponds to position 115 of SEQ ID NO: 1. In some embodiments, the polypeptide having protease activity comprises an amino acid sequence having at least 50%, at least 60%, at least 70%, at least 80%, at least 81%, at least 82%, at least 83%, at least 84%, at least 85%, at least 86%, at least 87%, at least 88%, at least 89%, at least 90%, at least 91%, at least 92%, at least 93%, at least 94%, at least 95%, at least 96%, at least 97%, at least 98%, or at least 99% sequence identity to SEQ ID NO: 1, provided that the amino acid sequence comprises mutations of K93D, S128A, D139E, K150E, L153P, N162E, H174E, G199P, N219G, K229E, E241D, I262K, H275Y, S306P, K324I, F333E, A343K, R360L, 177_183KEYQSNKdelinsRDNRDN (SEQ ID NOs: 920 and 919), wherein the positions correspond to SEQ ID NO: 1, and provided that the amino acid sequence comprises a cysteine (C) at a position in the polypeptide that corresponds to position 125 of SEQ ID NO: 1, a histidine (H) at a position in the polypeptide that corresponds to position 283 of SEQ ID NO: 1, an aspartic acid (D) at a position in the polypeptide that corresponds to position 305 of SEQ ID NO: 1, an aspartic acid (D) at a position in the polypeptide that corresponds to position 307 of SEQ ID NO: 1, and/or a lysine (K) at a position in the polypeptide that corresponds to position 115 of SEQ ID NO: 1. In some embodiments, the polypeptide having protease activity comprises an amino acid sequence having at least 50%, at least 60%, at least 70%, at least 80%, at least 81%, at least 82%, at least 83%, at least 84%, at least 85%, at least 86%, at least 87%, at least 88%, at least 89%, at least 90%, at least 91%, at least 92%, at least 93%, at least 94%, at least 95%, at least 96%, at least 97%, at least 98%, or at least 99% sequence identity to SEQ ID NO: 1, provided that the amino acid sequence comprises mutations of S128A, L153P, N162E, H174E, H197D, N219G, K229E, I262K, H275Y, K324I, F333N, 177_183KEYQSNKdelinsRDNRDN (SEQ ID NOs: 920 and 919), wherein the positions correspond to SEQ ID NO: 1, and provided that the amino acid sequence comprises a cysteine (C) at a position in the polypeptide that corresponds to position 125 of SEQ ID NO: 1, a histidine (H) at a position in the polypeptide that corresponds to position 283 of SEQ ID NO: 1, an aspartic acid (D) at a position in the polypeptide that corresponds to position 305 of SEQ ID NO: 1, an aspartic acid (D) at a position in the polypeptide that corresponds to position 307 of SEQ ID NO: 1, and/or a lysine (K) at a position in the polypeptide that corresponds to position 115 of SEQ ID NO: 1. In some embodiments, the polypeptide having protease activity comprises an amino acid sequence having at least 50%, at least 60%, at least 70%, at least 80%, at least 81%, at least 82%, at least 83%, at least 84%, at least 85%, at least 86%, at least 87%, at least 88%, at least 89%, at least 90%, at least 91%, at least 92%, at least 93%, at least 94%, at least 95%, at least 96%, at least 97%, at least 98%, or at least 99% sequence identity to SEQ ID NO: 1, provided that the amino acid sequence comprises mutations of K93D, S128A, K150E, L153P, N162E, H174E, H197D, N219G, K229E, I262K, H275Y, K324I, F333N, 177_183KEYQSNKdelinsRDNRDN (SEQ ID NOs: 920 and 919), wherein the positions correspond to SEQ ID NO: 1, and provided that the amino acid sequence comprises a cysteine (C) at a position in the polypeptide that corresponds to position 125 of SEQ ID NO: 1, a histidine (H) at a position in the polypeptide that corresponds to position 283 of SEQ ID NO: 1, an aspartic acid (D) at a position in the polypeptide that corresponds to position 305 of SEQ ID NO: 1, an aspartic acid (D) at a position in the polypeptide that corresponds to position 307 of SEQ ID NO: 1, and/or a lysine (K) at a position in the polypeptide that corresponds to position 115 of SEQ ID NO: 1. In some embodiments, the polypeptide having protease activity comprises an amino acid sequence having at least 50%, at least 60%, at least 70%, at least 80%, at least 81%, at least 82%, at least 83%, at least 84%, at least 85%, at least 86%, at least 87%, at least 88%, at least 89%, at least 90%, at least 91%, at least 92%, at least 93%, at least 94%, at least 95%, at least 96%, at least 97%, at least 98%, or at least 99% sequence identity to SEQ ID NO: 1, provided that the amino acid sequence comprises mutations of S128A, D139E, L153P, N162E, H174E, H197D, N219G, K229E, E241D, I262K, H275Y, K324I, F333N, 177_183KEYQSNKdelinsRDNRDN (SEQ ID NOs: 920 and 919), wherein the positions correspond to SEQ ID NO: 1, and provided that the amino acid sequence comprises a cysteine (C) at a position in the polypeptide that corresponds to position 125 of SEQ ID NO: 1, a histidine (H) at a position in the polypeptide that corresponds to position 283 of SEQ ID NO: 1, an aspartic acid (D) at a position in the polypeptide that corresponds to position 305 of SEQ ID NO: 1, an aspartic acid (D) at a position in the polypeptide that corresponds to position 307 of SEQ ID NO: 1, and/or a lysine (K) at a position in the polypeptide that corresponds to position 115 of SEQ ID NO: 1. In some embodiments, the polypeptide having protease activity comprises an amino acid sequence having at least 50%, at least 60%, at least 70%, at least 80%, at least 81%, at least 82%, at least 83%, at least 84%, at least 85%, at least 86%, at least 87%, at least 88%, at least 89%, at least 90%, at least 91%, at least 92%, at least 93%, at least 94%, at least 95%, at least 96%, at least 97%, at least 98%, or at least 99% sequence identity to SEQ ID NO: 1, provided that the amino acid sequence comprises mutations of S128A, L153P, N162E, H174E, H197D, N219G, K229E, I262K, H275Y, K324I, F333N, A343K, R360L, 177_183KEYQSNKdelinsRDNRDN (SEQ ID NOs: 920 and 919), wherein the positions correspond to SEQ ID NO: 1, and provided that the amino acid sequence comprises a cysteine ID NO: 1, and/or a lysine (K) at a position in the polypeptide that corresponds to position 115 of SEQ ID NO: 1. In some embodiments, the polypeptide having protease activity comprises an amino acid sequence having at least 50%, at least 60%, at least 70%, at least 80%, at least 81%, at least 82%, at least 83%, at least 84%, at least 85%, at least 86%, at least 87%, at least 88%, at least 89%, at least 90%, at least 91%, at least 92%, at least 93%, at least 94%, at least 95%, at least 96%, at least 97%, at least 98%, or at least 99% sequence identity to SEQ ID NO: 1, provided that the amino acid sequence comprises mutations of S128A, D139E, L153P, N162E, H174E, H197D, N219G, K229E, E241D, I262K, H275Y, K324I, F333N, A343K, R360L, 177_183KEYQSNKdelinsRDNRDN (SEQ ID NOs: 920 and 919), wherein the positions correspond to SEQ ID NO: 1, and provided that the amino acid sequence comprises a cysteine (C) at a position in the polypeptide that corresponds to position 125 of SEQ ID NO: 1, a histidine (H) at a position in the polypeptide that corresponds to position 283 of SEQ ID NO: 1, an aspartic acid (D) at a position in the polypeptide that corresponds to position 305 of SEQ ID NO: 1, an aspartic acid (D) at a position in the polypeptide that corresponds to position 307 of SEQ ID NO: 1, and/or a lysine (K) at a position in the polypeptide that corresponds to position 115 of SEQ ID NO: 1. In some embodiments, the polypeptide having protease activity comprises an amino acid sequence having at least 50%, at least 60%, at least 70%, at least 80%, at least 81%, at least 82%, at least 83%, at least 84%, at least 85%, at least 86%, at least 87%, at least 88%, at least 89%, at least 90%, at least 91%, at least 92%, at least 93%, at least 94%, at least 95%, at least 96%, at least 97%, at least 98%, or at least 99% sequence identity to SEQ ID NO: 1, provided that the amino acid sequence comprises mutations of K93D, S128A, D139E, K150E, L153P, N162E, H174E, H197D, N219G, K229E, E241D, I262K, H275Y, K324I, F333N, 177_183KEYQSNKdelinsRDNRDN (SEQ ID NOs: 920 and 919), wherein the positions correspond to SEQ ID NO: 1, and provided that the amino acid sequence comprises a cysteine (C) at a position in the polypeptide that corresponds to position 125 of SEQ ID NO: 1, a histidine (H) at a position in the polypeptide that corresponds to position 283 of SEQ ID NO: 1, an aspartic acid (D) at a position in the polypeptide that corresponds to position 305 of SEQ ID NO: 1, an aspartic acid (D) at a position in the polypeptide that corresponds to position 307 of SEQ ID NO: 1, and/or a lysine (K) at a position in the polypeptide that corresponds to position 115 of SEQ ID NO: 1. In some embodiments, the polypeptide having protease activity comprises an amino acid sequence having at least 50%, at least 60%, at least 70%, at least 80%, at least 81%, at least 82%, at least 83%, at least 84%, at least 85%, at least 86%, at least 87%, at least 88%, at least 89%, at least 90%, at least 91%, at least 92%, at least 93%, at least 94%, at least 95%, at least 96%, at least 97%, at least 98%, or at least 99% sequence identity to SEQ ID NO: 1, provided that the amino acid sequence comprises mutations of K93D, S128A, K150E, L153P, N162E, H174E, H197D, N219G, K229E, I262K, H275Y, K324I, F333N, A343K, R360L, 177_183KEYQSNKdelinsRDNRDN (SEQ ID NOs: 920 and 919), wherein the positions correspond to SEQ ID NO: 1, and provided that the amino acid sequence comprises a cysteine (C) at a position in the polypeptide that corresponds to position 125 of SEQ ID NO: 1, a histidine (H) at a position in the polypeptide that corresponds to position 283 of SEQ ID NO: 1, an aspartic acid (D) at a position in the polypeptide that corresponds to position 305 of SEQ ID NO: 1, an aspartic acid (D) at a position in the polypeptide that corresponds to position 307 of SEQ ID NO: 1, and/or a lysine (K) at a position in the polypeptide that corresponds to position 115 of SEQ ID NO: 1. In some embodiments, the polypeptide having protease activity comprises an amino acid sequence having at least 50%, at least 60%, at least 70%, at least 80%, at least 81%, at least 82%, at least 83%, at least 84%, at least 85%, at least 86%, at least 87%, at least 88%, at least 89%, at least 90%, at least 91%, at least 92%, at least 93%, at least 94%, at least 95%, at least 96%, at least 97%, at least 98%, or at least 99% sequence identity to SEQ ID NO: 1, provided that the amino acid sequence comprises mutations of K93D, S128A, D139E, K150E, L153P, N162E, H174E, H197D, N219G, K229E, E241D, I262K, H275Y, S306P, K324I, F333N, 177_183KEYQSNKdelinsRDNRDN (SEQ ID NOs: 920 and 919), wherein the positions correspond to SEQ ID NO: 1, and provided that the amino acid sequence comprises a cysteine (C) at a position in the polypeptide that corresponds to position 125 of SEQ ID NO: 1, a histidine (H) at a position in the polypeptide that corresponds to position 283 of SEQ ID NO: 1, an aspartic acid (D) at a position in the polypeptide that corresponds to position 305 of SEQ ID NO: 1, an aspartic acid (D) at a position in the polypeptide that corresponds to position 307 of SEQ ID NO: 1, and/or a lysine (K) at a position in the polypeptide that corresponds to position 115 of SEQ ID NO: 1. In some embodiments, the polypeptide having protease activity comprises an amino acid sequence having at least 50%, at least 60%, at least 70%, at least 80%, at least 81%, at least 82%, at least 83%, at least 84%, at least 85%, at least 86%, at least 87%, at least 88%, at least 89%, at least 90%, at least 91%, at least 92%, at least 93%, at least 94%, at least 95%, at least 96%, at least 97%, at least 98%, or at least 99% sequence identity to SEQ ID NO: 1, provided that the amino acid sequence comprises mutations of K93D, S128A, K150E, L153P, N162E, H174E, H197D, N219G, K229E, I262K, H275Y, S306P, K324I, F333N, A343K, R360L, 177_183KEYQSNKdelinsRDNRDN (SEQ ID NOs: 920 and 919), wherein the positions correspond to SEQ ID NO: 1, and provided that the amino acid sequence comprises a cysteine (C) at a position in the polypeptide that corresponds to position 125 of SEQ ID NO: 1, a histidine (H) at a position in the polypeptide that corresponds to position 283 of SEQ ID NO: 1, an aspartic acid (D) at a position in the polypeptide that corresponds to position 305 of SEQ ID NO: 1, an aspartic acid (D) at a position in the polypeptide that corresponds to position 307 of SEQ ID NO: 1, and/or a lysine (K) at a position in the polypeptide that corresponds to position 115 of SEQ ID NO: 1. In some embodiments, the polypeptide having protease activity comprises an amino acid sequence having at least 50%, at least 60%, at least 70%, at least 80%, at least 81%, at least 82%, at least 83%, at least 84%, at least 85%, at least 86%, at least 87%, at least 88%, at least 89%, at least 90%, at least 91%, at least 92%, at least 93%, at least 94%, at least 95%, at least 96%, at least 97%, at least 98%, or at least 99% sequence identity to SEQ ID NO: 1, provided that the amino acid sequence comprises mutations of K93D, S128A, D139E, K150E, L153P, N162E, H174E, H197D, N219G, K229E, E241D, I262K, H275Y, S306P, K324I, F333N, A343K, R360L, 177_183KEYQSNKdelinsRDNRDN (SEQ ID NOs: 920 and 919), wherein the positions correspond to SEQ ID NO: 1, and provided that the amino acid sequence comprises a cysteine (C) at a position in the polypeptide that corresponds to position 125 of SEQ ID NO: 1, a histidine (H) at a position in the polypeptide that corresponds to position 283 of SEQ ID NO: 1, an aspartic acid (D) at a position in the polypeptide that corresponds to position 305 of SEQ ID NO: 1, an aspartic acid (D) at a position in the polypeptide that corresponds to position 307 of SEQ ID NO: 1, and/or a lysine (K) at a position in the polypeptide that corresponds to position 115 of SEQ ID NO: 1. In some embodiments, the polypeptide having protease activity comprises an amino acid sequence having at least 50%, at least 60%, at least 70%, at least 80%, at least 81%, at least 82%, at least 83%, at least 84%, at least 85%, at least 86%, at least 87%, at least 88%, at least 89%, at least 90%, at least 91%, at least 92%, at least 93%, at least 94%, at least 95%, at least 96%, at least 97%, at least 98%, or at least 99% sequence identity to SEQ ID NO: 1, provided that the amino acid sequence comprises mutations of K93D, S128A, K150E, L153P, N162E, H174E, H197D, N219G, K229E, I262K, H275Y, K324I, F333E, 177_183KEYQSNKdelinsRDNRDN (SEQ ID NOs: 920 and 919), wherein the positions correspond to SEQ ID NO: 1, and provided that the amino acid sequence comprises a cysteine (C) at a position in the polypeptide that corresponds to position 125 of SEQ ID NO: 1, a histidine (H) at a position in the polypeptide that corresponds to position 283 of SEQ ID NO: 1, an aspartic acid (D) at a position in the polypeptide that corresponds to position 305 of SEQ ID NO: 1, an aspartic acid (D) at a position in the polypeptide that corresponds to position 307 of SEQ ID NO: 1, and/or a lysine (K) at a position in the polypeptide that corresponds to position 115 of SEQ ID NO: 1. In some embodiments, the polypeptide having protease activity comprises an amino acid sequence having at least 50%, at least 60%, at least 70%, at least 80%, at least 81%, at least 82%, at least 83%, at least 84%, at least 85%, at least 86%, at least 87%, at least 88%, at least 89%, at least 90%, at least 91%, at least 92%, at least 93%, at least 94%, at least 95%, at least 96%, at least 97%, at least 98%, or at least 99% sequence identity to SEQ ID NO: 1, provided that the amino acid sequence comprises mutations of K93D, S128A, D139E, K150E, L153P, N162E, H174E, H197D, N219G, K229E, E241D, I262K, H275Y, K324I, F333E, 177_183KEYQSNKdelinsRDNRDN (SEQ ID NOs: 920 and 919), wherein the positions correspond to SEQ ID NO: 1, and provided that the amino acid sequence comprises a cysteine (C) at a position in the polypeptide that corresponds to position 125 of SEQ ID NO: 1, a histidine (H) at a position in the polypeptide that corresponds to position 283 of SEQ ID NO: 1, an aspartic acid (D) at a position in the polypeptide that corresponds to position 305 of SEQ ID NO: 1, an aspartic acid (D) at a position in the polypeptide that corresponds to position 307 of SEQ ID NO: 1, and/or a lysine (K) at a position in the polypeptide that corresponds to position 115 of SEQ ID NO: 1. In some embodiments, the polypeptide having protease activity comprises an amino acid sequence having at least 50%, at least 60%, at least 70%, at least 80%, at least 81%, at least 82%, at least 83%, at least 84%, at least 85%, at least 86%, at least 87%, at least 88%, at least 89%, at least 90%, at least 91%, at least 92%, at least 93%, at least 94%, at least 95%, at least 96%, at least 97%, at least 98%, or at least 99% sequence identity to SEQ ID NO: 1, provided that the amino acid sequence comprises mutations of K93D, S128A, D139E, K150E, L153P, N162E, H174E, H197D, N219G, K229E, E241D, I262K, H275Y, K324I, F333E, A343K, R360L, 177_183KEYQSNKdelinsRDNRDN (SEQ ID NOs: 920 and 919), wherein the positions correspond to SEQ ID NO: 1, and provided that the amino acid sequence comprises a cysteine (C) at a position in the polypeptide that corresponds to position 125 of SEQ ID NO: 1, a histidine (H) at a position in the polypeptide that corresponds to position 283 of SEQ ID NO: 1, an aspartic acid (D) at a position in the polypeptide that corresponds to position 305 of SEQ ID NO: 1, an aspartic acid (D) at a position in the polypeptide that corresponds to position 307 of SEQ ID NO: 1, and/or a lysine (K) at a position in the polypeptide that corresponds to position 115 of SEQ ID NO: 1. In some embodiments, the polypeptide having protease activity comprises an amino acid sequence having at least 50%, at least 60%, at least 70%, at least 80%, at least 81%, at least 82%, at least 83%, at least 84%, at least 85%, at least 86%, at least 87%, at least 88%, at least 89%, at least 90%, at least 91%, at least 92%, at least 93%, at least 94%, at least 95%, at least 96%, at least 97%, at least 98%, or at least 99% sequence identity to SEQ ID NO: 1, provided that the amino acid sequence comprises mutations of K93D, S128A, D139E, K150E, L153P, N162E, H174E, H197D, N219G, K229E, E241D, I262K, H275Y, S306P, K324I, F333E, 177_183KEYQSNKdelinsRDNRDN (SEQ ID NOs: 920 and 919), wherein the positions correspond to SEQ ID NO: 1, and provided that the amino acid sequence comprises a cysteine (C) at a position in the polypeptide that corresponds to position 125 of SEQ ID NO: 1, a histidine (H) at a position in the polypeptide that corresponds to position 283 of SEQ ID NO: 1, an aspartic acid (D) at a position in the polypeptide that corresponds to position 305 of SEQ ID NO: 1, an aspartic acid (D) at a position in the polypeptide that corresponds to position 307 of SEQ ID NO: 1, and/or a lysine (K) at a position in the polypeptide that corresponds to position 115 of SEQ ID NO: 1. In some embodiments, the polypeptide having protease activity comprises an amino acid sequence having at least 50%, at least 60%, at least 70%, at least 80%, at least 81%, at least 82%, at least 83%, at least 84%, at least 85%, at least 86%, at least 87%, at least 88%, at least 89%, at least 90%, at least 91%, at least 92%, at least 93%, at least 94%, at least 95%, at least 96%, at least 97%, at least 98%, or at least 99% sequence identity to SEQ ID NO: 1, provided that the amino acid sequence comprises mutations of K93D, S128A, K150E, L153P, N162E, H174E, H197D, N219G, K229E, I262K, H275Y, S306P, K324I, F333E, A343K, R360L, 177_183KEYQSNKdelinsRDNRDN (SEQ ID NOs: 920 and 919), wherein the positions correspond to SEQ ID NO: 1, and provided that the amino acid sequence comprises a cysteine (C) at a position in the polypeptide that corresponds to position 125 of SEQ ID NO: 1, a histidine (H) at a position in the polypeptide that corresponds to position 283 of SEQ ID NO: 1, an aspartic acid (D) at a position in the polypeptide that corresponds to position 305 of SEQ ID NO: 1, an aspartic acid (D) at a position in the polypeptide that corresponds to position 307 of SEQ ID NO: 1, and/or a lysine (K) at a position in the polypeptide that corresponds to position 115 of SEQ ID NO: 1. In some embodiments, the polypeptide having protease activity comprises an amino acid sequence having at least 50%, at least 60%, at least 70%, at least 80%, at least 81%, at least 82%, at least 83%, at least 84%, at least 85%, at least 86%, at least 87%, at least 88%, at least 89%, at least 90%, at least 91%, at least 92%, at least 93%, at least 94%, at least 95%, at least 96%, at least 97%, at least 98%, or at least 99% sequence identity to SEQ ID NO: 1, provided that the amino acid sequence comprises mutations of K93D, S128A, D139E, K150E, L153P, N162E, H174E, H197D, N219G, K229E, E241D, I262K, H275Y, S306P, K324I, F333E, A343K, R360L, 177_183KEYQSNKdelinsRDNRDN (SEQ ID NOs: 920 and 919), wherein the positions correspond to SEQ ID NO: 1, and provided that the amino acid sequence comprises a cysteine (C) at a position in the polypeptide that corresponds to position 125 of SEQ ID NO: 1, a histidine (H) at a position in the polypeptide that corresponds to position 283 of SEQ ID NO: 1, an aspartic acid (D) at a position in the polypeptide that corresponds to position 305 of SEQ ID NO: 1, an aspartic acid (D) at a position in the polypeptide that corresponds to position 307 of SEQ ID NO: 1, and/or a lysine (K) at a position in the polypeptide that corresponds to position 115 of SEQ ID NO: 1. In some embodiments, the polypeptide having protease activity comprises an amino acid sequence having at least 50%, at least 60%, at least 70%, at least 80%, at least 81%, at least 82%, at least 83%, at least 84%, at least 85%, at least 86%, at least 87%, at least 88%, at least 89%, at least 90%, at least 91%, at least 92%, at least 93%, at least 94%, at least 95%, at least 96%, at least 97%, at least 98%, or at least 99% sequence identity to SEQ ID NO: 1, provided that the amino acid sequence comprises mutations of K93D, S128A, K150E, L153P, N162E, H174E, G199P, N219G, K229E, H275Y, K324I, F333N, 177_183KEYQSNKdelinsRDNRDN (SEQ ID NOs: 920 and 919), wherein the positions correspond to SEQ ID NO: 1, and provided that the amino acid sequence comprises a cysteine (C) at a position in the polypeptide that corresponds to position 125 of SEQ ID NO: 1, a histidine (H) at a position in the polypeptide that corresponds to position 283 of SEQ ID NO: 1, an aspartic acid (D) at a position in the polypeptide that corresponds to position 305 of SEQ ID NO: 1, an aspartic acid (D) at a position in the polypeptide that corresponds to position 307 of SEQ ID NO: 1, and/or a lysine (K) at a position in the polypeptide that corresponds to position 115 of SEQ ID NO: 1. In some embodiments, the polypeptide having protease activity comprises an amino acid sequence having at least 50%, at least 60%, at least 70%, at least 80%, at least 81%, at least 82%, at least 83%, at least 84%, at least 85%, at least 86%, at least 87%, at least 88%, at least 89%, at least 90%, at least 91%, at least 92%, at least 93%, at least 94%, at least 95%, at least 96%, at least 97%, at least 98%, or at least 99% sequence identity to SEQ ID NO: 1, provided that the amino acid sequence comprises mutations of S128A, D139E, L153P, N162E, H174E, G199P, N219G, K229E, E241D, H275Y, K324I, F333N, 177_183KEYQSNKdelinsRDNRDN (SEQ ID NOs: 920 and 919), wherein the positions correspond to SEQ ID NO: 1, and provided that the amino acid sequence comprises a cysteine (C) at a position in the polypeptide that corresponds to position 125 of SEQ ID NO: 1, a histidine (H) at a position in the polypeptide that corresponds to position 283 of SEQ ID NO: 1, an aspartic acid (D) at a position in the polypeptide that corresponds to position 305 of SEQ ID NO: 1, an aspartic acid (D) at a position in the polypeptide that corresponds to position 307 of SEQ ID NO: 1, and/or a lysine (K) at a position in the polypeptide that corresponds to position 115 of SEQ ID NO: 1. In some embodiments, the polypeptide having protease activity comprises an amino acid sequence having at least 50%, at least 60%, at least 70%, at least 80%, at least 81%, at least 82%, at least 83%, at least 84%, at least 85%, at least 86%, at least 87%, at least 88%, at least 89%, at least 90%, at least 91%, at least 92%, at least 93%, at least 94%, at least 95%, at least 96%, at least 97%, at least 98%, or at least 99% sequence identity to SEQ ID NO: 1, provided that the amino acid sequence comprises mutations of S128A, L153P, N162E, H174E, G199P, N219G, K229E, H275Y, K324I, F333N, A343K, R360L, 177_183KEYQSNKdelinsRDNRDN (SEQ ID NOs: 920 and 919), wherein the positions correspond to SEQ ID NO: 1, and provided that the amino acid sequence comprises a cysteine (C) at a position in the polypeptide that corresponds to position 125 of SEQ ID NO: 1, a histidine (H) at a position in the polypeptide that corresponds to position 283 of SEQ ID NO: 1, an aspartic acid (D) at a position in the polypeptide that corresponds to position 305 of SEQ ID NO: 1, an aspartic acid (D) at a position in the polypeptide that corresponds to position 307 of SEQ ID NO: 1, and/or a lysine (K) at a position in the polypeptide that corresponds to position 115 of SEQ ID NO: 1. In some embodiments, the polypeptide having protease activity comprises an amino acid sequence having at least 50%, at least 60%, at least 70%, at least 80%, at least 81%, at least 82%, at least 83%, at least 84%, at least 85%, at least 86%, at least 87%, at least 88%, at least 89%, at least 90%, at least 91%, at least 92%, at least 93%, at least 94%, at least 95%, at least 96%, at least 97%, at least 98%, or at least 99% sequence identity to SEQ ID NO: 1, provided that the amino acid sequence comprises mutations of S128A, D139E, L153P, N162E, H174E, G199P, N219G, K229E, E241D, H275Y, K324I, F333N, A343K, R360L, 177_183KEYQSNKdelinsRDNRDN (SEQ ID NOs: 920 and 919), wherein the positions correspond to SEQ ID NO: 1, and provided that the amino acid sequence comprises a cysteine (C) at a position in the polypeptide that corresponds to position 125 of SEQ ID NO: 1, a histidine (H) at a position in the polypeptide that corresponds to position 283 of SEQ ID NO: 1, an aspartic acid (D) at a position in the polypeptide that corresponds to position 305 of SEQ ID NO: 1, an aspartic acid (D) at a position in the polypeptide that corresponds to position 307 of SEQ ID NO: 1, and/or a lysine (K) at a position in the polypeptide that corresponds to position 115 of SEQ ID NO: 1. In some embodiments, the polypeptide having protease activity comprises an amino acid sequence having at least 50%, at least 60%, at least 70%, at least 80%, at least 81%, at least 82%, at least 83%, at least 84%, at least 85%, at least 86%, at least 87%, at least 88%, at least 89%, at least 90%, at least 91%, at least 92%, at least 93%, at least 94%, at least 95%, at least 96%, at least 97%, at least 98%, or at least 99% sequence identity to SEQ ID NO: 1, provided that the amino acid sequence comprises mutations of K93D, S128A, D139E, K150E, L153P, N162E, H174E, G199P, N219G, K229E, E241D, H275Y, K324I, F333N, 177_183KEYQSNKdelinsRDNRDN (SEQ ID NOs: 920 and 919), wherein the positions correspond to SEQ ID NO: 1, and provided that the amino acid sequence comprises a cysteine (C) at a position in the polypeptide that corresponds to position 125 of SEQ ID NO: 1, a histidine (H) at a position in the polypeptide that corresponds to position 283 of SEQ ID NO: 1, an aspartic acid (D) at a position in the polypeptide that corresponds to position 305 of SEQ ID NO: 1, an aspartic acid (D) at a position in the polypeptide that corresponds to position 307 of SEQ ID NO: 1, and/or a lysine (K) at a position in the polypeptide that corresponds to position 115 of SEQ ID NO: 1. In some embodiments, the polypeptide having protease activity comprises an amino acid sequence having at least 50%, at least 60%, at least 70%, at least 80%, at least 81%, at least 82%, at least 83%, at least 84%, at least 85%, at least 86%, at least 87%, at least 88%, at least 89%, at least 90%, at least 91%, at least 92%, at least 93%, at least 94%, at least 95%, at least 96%, at least 97%, at least 98%, or at least 99% sequence identity to SEQ ID NO: 1, provided that the amino acid sequence comprises mutations of K93D, S128A, K150E, L153P, N162E, H174E, G199P, N219G, K229E, H275Y, K324I, F333N, A343K, R360L, 177_183KEYQSNKdelinsRDNRDN (SEQ ID NOs: 920 and 919), wherein the positions correspond to SEQ ID NO: 1, and provided that the amino acid sequence comprises a cysteine (C) at a position in the polypeptide that corresponds to position 125 of SEQ ID NO: 1, a histidine (H) at a position in the polypeptide that corresponds to position 283 of SEQ ID NO: 1, an aspartic acid (D) at a position in the polypeptide that corresponds to position 305 of SEQ ID NO: 1, an aspartic acid (D) at a position in the polypeptide that corresponds to position 307 of SEQ ID NO: 1, and/or a lysine (K) at a position in the polypeptide that corresponds to position 115 of SEQ ID NO: 1. In some embodiments, the polypeptide having protease activity comprises an amino acid sequence having at least 50%, at least 60%, at least 70%, at least 80%, at least 81%, at least 82%, at least 83%, at least 84%, at least 85%, at least 86%, at least 87%, at least 88%, at least 89%, at least 90%, at least 91%, at least 92%, at least 93%, at least 94%, at least 95%, at least 96%, at least 97%, at least 98%, or at least 99% sequence identity to SEQ ID NO: 1, provided that the amino acid sequence comprises mutations of S128A, D139E, L153P, N162E, N219G, K229E, H275Y, K324I, F333N, 177_183KEYQSNKdelinsRDNRDN (SEQ ID NOs: 920 and 919), wherein the positions correspond to SEQ ID NO: 1, and provided that the amino acid sequence comprises a cysteine (C) at a position in the polypeptide that corresponds to position 125 of SEQ ID NO: 1, a histidine (H) at a position in the polypeptide that corresponds to position 283 of SEQ ID NO: 1, an aspartic acid (D) at a position in the polypeptide that corresponds to position 305 of SEQ ID NO: 1, an aspartic acid (D) at a position in the polypeptide that corresponds to position 307 of SEQ ID NO: 1, and/or a lysine (K) at a position in the polypeptide that corresponds to position 115 of SEQ ID NO: 1. In some embodiments, the polypeptide having protease activity comprises an amino acid sequence having at least 50%, at least 60%, at least 70%, at least 80%, at least 81%, at least 82%, at least 83%, at least 84%, at least 85%, at least 86%, at least 87%, at least 88%, at least 89%, at least 90%, at least 91%, at least 92%, at least 93%, at least 94%, at least 95%, at least 96%, at least 97%, at least 98%, or at least 99% sequence identity to SEQ ID NO: 1, provided that the amino acid sequence comprises mutations of S128A, L153P, N162E, N219G, K229E, E241D, H275Y, K324I, F333N, 177_183KEYQSNKdelinsRDNRDN (SEQ ID NOs: 920 and 919), wherein the positions correspond to SEQ ID NO: 1, and provided that the amino acid sequence comprises a cysteine ID NO: 1, and/or a lysine (K) at a position in the polypeptide that corresponds to position 115 of SEQ ID NO: 1. In some embodiments, the polypeptide having protease activity comprises an amino acid sequence having at least 50%, at least 60%, at least 70%, at least 80%, at least 81%, at least 82%, at least 83%, at least 84%, at least 85%, at least 86%, at least 87%, at least 88%, at least 89%, at least 90%, at least 91%, at least 92%, at least 93%, at least 94%, at least 95%, at least 96%, at least 97%, at least 98%, or at least 99% sequence identity to SEQ ID NO: 1, provided that the amino acid sequence comprises mutations of S128A, L153P, N162E, N219G, K229E, H275Y, K324I, F333N, A343K, 177_183KEYQSNKdelinsRDNRDN (SEQ ID NOs: 920 and 919), wherein the positions correspond to SEQ ID NO: 1, and provided that the amino acid sequence comprises a cysteine (C) at a position in the polypeptide that corresponds to position 125 of SEQ ID NO: 1, a histidine (H) at a position in the polypeptide that corresponds to position 283 of SEQ ID NO: 1, an aspartic acid (D) at a position in the polypeptide that corresponds to position 305 of SEQ ID NO: 1, an aspartic acid (D) at a position in the polypeptide that corresponds to position 307 of SEQ ID NO: 1, and/or a lysine (K) at a position in the polypeptide that corresponds to position 115 of SEQ ID NO: 1. In some embodiments, the polypeptide having protease activity comprises an amino acid sequence having at least 50%, at least 60%, at least 70%, at least 80%, at least 81%, at least 82%, at least 83%, at least 84%, at least 85%, at least 86%, at least 87%, at least 88%, at least 89%, at least 90%, at least 91%, at least 92%, at least 93%, at least 94%, at least 95%, at least 96%, at least 97%, at least 98%, or at least 99% sequence identity to SEQ ID NO: 1, provided that the amino acid sequence comprises mutations of S128A, L153P, N162E, N219G, K229E, H275Y, K324I, F333E, 177_183KEYQSNKdelinsRDNRDN (SEQ ID NOs: 920 and 919), wherein the positions correspond to SEQ ID NO: 1, and provided that the amino acid sequence comprises a cysteine (C) at a position in the polypeptide that corresponds to position 125 of SEQ ID NO: 1, a histidine (H) at a position in the polypeptide that corresponds to position 283 of SEQ ID NO: 1, an aspartic acid (D) at a position in the polypeptide that corresponds to position 305 of SEQ ID NO: 1, an aspartic acid (D) at a position in the polypeptide that corresponds to position 307 of SEQ ID NO: 1, and/or a lysine (K) at a position in the polypeptide that corresponds to position 115 of SEQ ID NO: 1. In some embodiments, the polypeptide having protease activity comprises an amino acid sequence having at least 50%, at least 60%, at least 70%, at least 80%, at least 81%, at least 82%, at least 83%, at least 84%, at least 85%, at least 86%, at least 87%, at least 88%, at least 89%, at least 90%, at least 91%, at least 92%, at least 93%, at least 94%, at least 95%, at least 96%, at least 97%, at least 98%, or at least 99% sequence identity to SEQ ID NO: 1, provided that the amino acid sequence comprises mutations of S128A, L153P, N162E, N219G, K229E, H275Y, R282G, K324I, F333N, 177_183KEYQSNKdelinsRDNRDN (SEQ ID NOs: 920 and 919), wherein the positions correspond to SEQ ID NO: 1, and provided that the amino acid sequence comprises a cysteine (C) at a position in the polypeptide that corresponds to position 125 of SEQ ID NO: 1, a histidine (H) at a position in the polypeptide that corresponds to position 283 of SEQ ID NO: 1, an aspartic acid (D) at a position in the polypeptide that corresponds to position 305 of SEQ ID NO: 1, an aspartic acid (D) at a position in the polypeptide that corresponds to position 307 of SEQ ID NO: 1, and/or a lysine (K) at a position in the polypeptide that corresponds to position 115 of SEQ ID NO: 1. In some embodiments, the polypeptide having protease activity comprises an amino acid sequence having at least 50%, at least 60%, at least 70%, at least 80%, at least 81%, at least 82%, at least 83%, at least 84%, at least 85%, at least 86%, at least 87%, at least 88%, at least 89%, at least 90%, at least 91%, at least 92%, at least 93%, at least 94%, at least 95%, at least 96%, at least 97%, at least 98%, or at least 99% sequence identity to SEQ ID NO: 1, provided that the amino acid sequence comprises mutations of S128A, L153P, N162E, H197D, N219G, K229E, H275Y, K324I, F333N, 177_183KEYQSNKdelinsRDNRDN (SEQ ID NOs: 920 and 919), wherein the positions correspond to SEQ ID NO: 1, and provided that the amino acid sequence comprises a cysteine (C) at a position in the polypeptide that corresponds to position 125 of SEQ ID NO: 1, a histidine (H) at a position in the polypeptide that corresponds to position 283 of SEQ ID NO: 1, an aspartic acid (D) at a position in the polypeptide that corresponds to position 305 of SEQ ID NO: 1, an aspartic acid (D) at a position in the polypeptide that corresponds to position 307 of SEQ ID NO: 1, and/or a lysine (K) at a position in the polypeptide that corresponds to position 115 of SEQ ID NO: 1. In some embodiments, the polypeptide having protease activity comprises an amino acid sequence having at least 50%, at least 60%, at least 70%, at least 80%, at least 81%, at least 82%, at least 83%, at least 84%, at least 85%, at least 86%, at least 87%, at least 88%, at least 89%, at least 90%, at least 91%, at least 92%, at least 93%, at least 94%, at least 95%, at least 96%, at least 97%, at least 98%, or at least 99% sequence identity to SEQ ID NO: 1, provided that the amino acid sequence comprises mutations of S128A, L153P, N162E, N219G, K229E, H275Y, K324I, F333N, R360L, 177_183KEYQSNKdelinsRDNRDN (SEQ ID NOS: 920 and 919), wherein the positions correspond to SEQ ID NO: 1, and provided that the amino acid sequence comprises a cysteine (C) at a position in the polypeptide that corresponds to position 125 of SEQ ID NO: 1, a histidine (H) at a position in the polypeptide that corresponds to position 283 of SEQ ID NO: 1, an aspartic acid (D) at a position in the polypeptide that corresponds to position 305 of SEQ ID NO: 1, an aspartic acid (D) at a position in the polypeptide that corresponds to position 307 of SEQ ID NO: 1, and/or a lysine (K) at a position in the polypeptide that corresponds to position 115 of SEQ ID NO: 1. In some embodiments, the polypeptide having protease activity comprises an amino acid sequence having at least 50%, at least 60%, at least 70%, at least 80%, at least 81%, at least 82%, at least 83%, at least 84%, at least 85%, at least 86%, at least 87%, at least 88%, at least 89%, at least 90%, at least 91%, at least 92%, at least 93%, at least 94%, at least 95%, at least 96%, at least 97%, at least 98%, or at least 99% sequence identity to SEQ ID NO: 1, provided that the amino acid sequence comprises mutations of S128A, L153P, N162E, N219G, K229E, I262K, H275Y, K324I, F333N, 177_183KEYQSNKdelinsRDNRDN (SEQ ID NOs: 920 and 919), wherein the positions correspond to SEQ ID NO: 1, and provided that the amino acid sequence comprises a cysteine (C) at a position in the polypeptide that corresponds to position 125 of SEQ ID NO: 1, a histidine (H) at a position in the polypeptide that corresponds to position 283 of SEQ ID NO: 1, an aspartic acid (D) at a position in the polypeptide that corresponds to position 305 of SEQ ID NO: 1, an aspartic acid (D) at a position in the polypeptide that corresponds to position 307 of SEQ ID NO: 1, and/or a lysine (K) at a position in the polypeptide that corresponds to position 115 of SEQ ID NO: 1. In some embodiments, the polypeptide having protease activity comprises an amino acid sequence having at least 50%, at least 60%, at least 70%, at least 80%, at least 81%, at least 82%, at least 83%, at least 84%, at least 85%, at least 86%, at least 87%, at least 88%, at least 89%, at least 90%, at least 91%, at least 92%, at least 93%, at least 94%, at least 95%, at least 96%, at least 97%, at least 98%, or at least 99% sequence identity to SEQ ID NO: 1, provided that the amino acid sequence comprises mutations of S128A, L153P, N162E, G199P, N219G, K229E, H275Y, K324I, F333N, 177_183KEYQSNKdelinsRDNRDN (SEQ ID NOs: 920 and 919), wherein the positions correspond to SEQ ID NO: 1, and provided that the amino acid sequence comprises a cysteine (C) at a position in the polypeptide that corresponds to position 125 of SEQ ID NO: 1, a histidine (H) at a position in the polypeptide that corresponds to position 283 of SEQ ID NO: 1, an aspartic acid (D) at a position in the polypeptide that corresponds to position 305 of SEQ ID NO: 1, an aspartic acid (D) at a position in the polypeptide that corresponds to position 307 of SEQ ID NO: 1, and/or a lysine (K) at a position in the polypeptide that corresponds to position 115 of SEQ ID NO: 1. In some embodiments, the polypeptide having protease activity comprises an amino acid sequence having at least 50%, at least 60%, at least 70%, at least 80%, at least 81%, at least 82%, at least 83%, at least 84%, at least 85%, at least 86%, at least 87%, at least 88%, at least 89%, at least 90%, at least 91%, at least 92%, at least 93%, at least 94%, at least 95%, at least 96%, at least 97%, at least 98%, or at least 99% sequence identity to SEQ ID NO: 1, provided that the amino acid sequence comprises mutations of S128A, L153P, N162E, N219G, K229E, H275Y, Y281S, K324I, F333N, 177_183KEYQSNKdelinsRDNRDN (SEQ ID NOs: 920 and 919), wherein the positions correspond to SEQ ID NO: 1, and provided that the amino acid sequence comprises a cysteine (C) at a position in the polypeptide that corresponds to position 125 of SEQ ID NO: 1, a histidine (H) at a position in the polypeptide that corresponds to position 283 of SEQ ID NO: 1, an aspartic acid (D) at a position in the polypeptide that corresponds to position 305 of SEQ ID NO: 1, an aspartic acid (D) at a position in the polypeptide that corresponds to position 307 of SEQ ID NO: 1, and/or a lysine (K) at a position in the polypeptide that corresponds to position 115 of SEQ ID NO: 1. In some embodiments, the polypeptide having protease activity comprises an amino acid sequence having at least 50%, at least 60%, at least 70%, at least 80%, at least 81%, at least 82%, at least 83%, at least 84%, at least 85%, at least 86%, at least 87%, at least 88%, at least 89%, at least 90%, at least 91%, at least 92%, at least 93%, at least 94%, at least 95%, at least 96%, at least 97%, at least 98%, or at least 99% sequence identity to SEQ ID NO: 1, provided that the amino acid sequence comprises mutations of K93D, S128A, L153P, N162E, N219G, K229E, H275Y, K324I, F333N, 177_183KEYQSNKdelinsRDNRDN (SEQ ID NOS: 920 and 919), wherein the positions correspond to SEQ ID NO: 1, and provided that the amino acid sequence comprises a cysteine (C) at a position in the polypeptide that corresponds to position 125 of SEQ ID NO: 1, a histidine (H) at a position in the polypeptide that corresponds to position 283 of SEQ ID NO: 1, an aspartic acid (D) at a position in the polypeptide that corresponds to position 305 of SEQ ID NO: 1, an aspartic acid (D) at a position in the polypeptide that corresponds to position 307 of SEQ ID NO: 1, and/or a lysine (K) at a position in the polypeptide that corresponds to position 115 of SEQ ID NO: 1. In some embodiments, the polypeptide having protease activity comprises an amino acid sequence having at least 50%, at least 60%, at least 70%, at least 80%, at least 81%, at least 82%, at least 83%, at least 84%, at least 85%, at least 86%, at least 87%, at least 88%, at least 89%, at least 90%, at least 91%, at least 92%, at least 93%, at least 94%, at least 95%, at least 96%, at least 97%, at least 98%, or at least 99% sequence identity to SEQ ID NO: 1, provided that the amino acid sequence comprises mutations of S128A, L153P, N162E, N219G, K229E, H275Y, S306P, K324I, F333N, 177_183KEYQSNKdelinsRDNRDN (SEQ ID NOs: 920 and 919), wherein the positions correspond to SEQ ID NO: 1, and provided that the amino acid sequence comprises a cysteine (C) at a position in the polypeptide that corresponds to position 125 of SEQ ID NO: 1, a histidine (H) at a position in the polypeptide that corresponds to position 283 of SEQ ID NO: 1, an aspartic acid (D) at a position in the polypeptide that corresponds to position 305 of SEQ ID NO: 1, an aspartic acid (D) at a position in the polypeptide that corresponds to position 307 of SEQ ID NO: 1, and/or a lysine (K) at a position in the polypeptide that corresponds to position 115 of SEQ ID NO: 1. In some embodiments, the polypeptide having protease activity comprises an amino acid sequence having at least 50%, at least 60%, at least 70%, at least 80%, at least 81%, at least 82%, at least 83%, at least 84%, at least 85%, at least 86%, at least 87%, at least 88%, at least 89%, at least 90%, at least 91%, at least 92%, at least 93%, at least 94%, at least 95%, at least 96%, at least 97%, at least 98%, or at least 99% sequence identity to SEQ ID NO: 1, provided that the amino acid sequence comprises mutations of S128A, K150E, L153P, N162E, N219G, K229E, H275Y, K324I, F333N, 177_183KEYQSNKdelinsRDNRDN (SEQ ID NOs: 920 and 919), wherein the positions correspond to SEQ ID NO: 1, and provided that the amino acid sequence comprises a cysteine (C) at a position in the polypeptide that corresponds to position 125 of SEQ ID NO: 1, a histidine (H) at a position in the polypeptide that corresponds to position 283 of SEQ ID NO: 1, an aspartic acid (D) at a position in the polypeptide that corresponds to position 305 of SEQ ID NO: 1, an aspartic acid (D) at a position in the polypeptide that corresponds to position 307 of SEQ ID NO: 1, and/or a lysine (K) at a position in the polypeptide that corresponds to position 115 of SEQ ID NO: 1. In some embodiments, the polypeptide having protease activity comprises an amino acid sequence having at least 50%, at least 60%, at least 70%, at least 80%, at least 81%, at least 82%, at least 83%, at least 84%, at least 85%, at least 86%, at least 87%, at least 88%, at least 89%, at least 90%, at least 91%, at least 92%, at least 93%, at least 94%, at least 95%, at least 96%, at least 97%, at least 98%, or at least 99% sequence identity to SEQ ID NO: 1, provided that the amino acid sequence comprises mutations of S128A, L153P, N162E, H174E, K196S, N219G, K229E, H275Y, K318A, K324I, F333N, 177_183KEYQSNKdelinsRDNRDN (SEQ ID NOs: 920 and 919), wherein the positions correspond to SEQ ID NO: 1, and provided that the amino acid sequence comprises a cysteine (C) at a position in the polypeptide that corresponds to position 125 of SEQ ID NO: 1, a histidine (H) at a position in the polypeptide that corresponds to position 283 of SEQ ID NO: 1, an aspartic acid (D) at a position in the polypeptide that corresponds to position 305 of SEQ ID NO: 1, an aspartic acid (D) at a position in the polypeptide that corresponds to position 307 of SEQ ID NO: 1, and/or a lysine (K) at a position in the polypeptide that corresponds to position 115 of SEQ ID NO: 1. In some embodiments, the polypeptide having protease activity comprises an amino acid sequence having at least 50%, at least 60%, at least 70%, at least 80%, at least 81%, at least 82%, at least 83%, at least 84%, at least 85%, at least 86%, at least 87%, at least 88%, at least 89%, at least 90%, at least 91%, at least 92%, at least 93%, at least 94%, at least 95%, at least 96%, at least 97%, at least 98%, or at least 99% sequence identity to SEQ ID NO: 1, provided that the amino acid sequence comprises mutations of S128A, L153P, N162E, H174E, N219G, H222Q, K229E, H275Y, R280E, K324I, F333N, 177_183KEYQSNKdelinsRDNRDN (SEQ ID NOs: 920 and 919), wherein the positions correspond to SEQ ID NO: 1, and provided that the amino acid sequence comprises a cysteine (C) at a position in the polypeptide that corresponds to position 125 of SEQ ID NO: 1, a histidine (H) at a position in the polypeptide that corresponds to position 283 of SEQ ID NO: 1, an aspartic acid (D) at a position in the polypeptide that corresponds to position 305 of SEQ ID NO: 1, an aspartic acid (D) at a position in the polypeptide that corresponds to position 307 of SEQ ID NO: 1, and/or a lysine (K) at a position in the polypeptide that corresponds to position 115 of SEQ ID NO: 1. In some embodiments, the polypeptide having protease activity comprises an amino acid sequence having at least 50%, at least 60%, at least 70%, at least 80%, at least 81%, at least 82%, at least 83%, at least 84%, at least 85%, at least 86%, at least 87%, at least 88%, at least 89%, at least 90%, at least 91%, at least 92%, at least 93%, at least 94%, at least 95%, at least 96%, at least 97%, at least 98%, or at least 99% sequence identity to SEQ ID NO: 1, provided that the amino acid sequence comprises mutations of S128A, L153P, N162E, H174E, K196S, N219G, H222Q, K229E, H275Y, R280E, K318A, K324I, F333N, 177_183KEYQSNKdelinsRDNRDN (SEQ ID NOs: 920 and 919), wherein the positions correspond to SEQ ID NO: 1, and provided that the amino acid sequence comprises a cysteine (C) at a position in the polypeptide that corresponds to position 125 of SEQ ID NO: 1, a histidine (H) at a position in the polypeptide that corresponds to position 283 of SEQ ID NO: 1, an aspartic acid (D) at a position in the polypeptide that corresponds to position 305 of SEQ ID NO: 1, an aspartic acid (D) at a position in the polypeptide that corresponds to position 307 of SEQ ID NO: 1, and/or a lysine (K) at a position in the polypeptide that corresponds to position 115 of SEQ ID NO: 1. In some embodiments, the polypeptide having protease activity comprises an amino acid sequence having at least 50%, at least 60%, at least 70%, at least 80%, at least 81%, at least 82%, at least 83%, at least 84%, at least 85%, at least 86%, at least 87%, at least 88%, at least 89%, at least 90%, at least 91%, at least 92%, at least 93%, at least 94%, at least 95%, at least 96%, at least 97%, at least 98%, or at least 99% sequence identity to SEQ ID NO: 1, provided that the amino acid sequence comprises mutations of S128A, L153P, N162E, H174E, N219G, K229E, H275Y, K324I, D332K, F333N, 177_183KEYQSNKdelinsRDNRDN (SEQ ID NOs: 920 and 919), wherein the positions correspond to SEQ ID NO: 1, and provided that the amino acid sequence comprises a cysteine (C) at a position in the polypeptide that corresponds to position 125 of SEQ ID NO: 1, a histidine (H) at a position in the polypeptide that corresponds to position 283 of SEQ ID NO: 1, an aspartic acid (D) at a position in the polypeptide that corresponds to position 305 of SEQ ID NO: 1, an aspartic acid (D) at a position in the polypeptide that corresponds to position 307 of SEQ ID NO: 1, and/or a lysine (K) at a position in the polypeptide that corresponds to position 115 of SEQ ID NO: 1. In some embodiments, the polypeptide having protease activity comprises an amino acid sequence having at least 50%, at least 60%, at least 70%, at least 80%, at least 81%, at least 82%, at least 83%, at least 84%, at least 85%, at least 86%, at least 87%, at least 88%, at least 89%, at least 90%, at least 91%, at least 92%, at least 93%, at least 94%, at least 95%, at least 96%, at least 97%, at least 98%, or at least 99% sequence identity to SEQ ID NO: 1, provided that the amino acid sequence comprises mutations of S128A, L153P, N162E, H174E, N219G, K229E, N233G, H275Y, K324I, F333N, 177_183KEYQSNKdelinsRDNRDN (SEQ ID NOs: 920 and 919), wherein the positions correspond to SEQ ID NO: 1, and provided that the amino acid sequence comprises a cysteine (C) at a position in the polypeptide that corresponds to position 125 of SEQ ID NO: 1, a histidine (H) at a position in the polypeptide that corresponds to position 283 of SEQ ID NO: 1, an aspartic acid (D) at a position in the polypeptide that corresponds to position 305 of SEQ ID NO: 1, an aspartic acid (D) at a position in the polypeptide that corresponds to position 307 of SEQ ID NO: 1, and/or a lysine (K) at a position in the polypeptide that corresponds to position 115 of SEQ ID NO: 1. In some embodiments, the polypeptide having protease activity comprises an amino acid sequence having at least 50%, at least 60%, at least 70%, at least 80%, at least 81%, at least 82%, at least 83%, at least 84%, at least 85%, at least 86%, at least 87%, at least 88%, at least 89%, at least 90%, at least 91%, at least 92%, at least 93%, at least 94%, at least 95%, at least 96%, at least 97%, at least 98%, or at least 99% sequence identity to SEQ ID NO: 1, provided that the amino acid sequence comprises mutations of S128A, L153P, N162E, H174E, N219G, K229E, I254R, H275Y, K324I, F333N, 177_183KEYQSNKdelinsRDNRDN (SEQ ID NOs: 920 and 919), wherein the positions correspond to SEQ ID NO: 1, and provided that the amino acid sequence comprises a cysteine (C) at a position in the polypeptide that corresponds to position 125 of SEQ ID NO: 1, a histidine (H) at a position in the polypeptide that corresponds to position 283 of SEQ ID NO: 1, an aspartic acid (D) at a position in the polypeptide that corresponds to position 305 of SEQ ID NO: 1, an aspartic acid (D) at a position in the polypeptide that corresponds to position 307 of SEQ ID NO: 1, and/or a lysine (K) at a position in the polypeptide that corresponds to position 115 of SEQ ID NO: 1. In some embodiments, the polypeptide having protease activity comprises an amino acid sequence having at least 50%, at least 60%, at least 70%, at least 80%, at least 81%, at least 82%, at least 83%, at least 84%, at least 85%, at least 86%, at least 87%, at least 88%, at least 89%, at least 90%, at least 91%, at least 92%, at least 93%, at least 94%, at least 95%, at least 96%, at least 97%, at least 98%, or at least 99% sequence identity to SEQ ID NO: 1, provided that the amino acid sequence comprises mutations of S128A, L153P, N162E, H174E, N219G, K229E, H275Y, K324I, F333N, E363K, 177_183KEYQSNKdelinsRDNRDN (SEQ ID NOs: 920 and 919), wherein the positions correspond to SEQ ID NO: 1, and provided that the amino acid sequence comprises a cysteine (C) at a position in the polypeptide that corresponds to position 125 of SEQ ID NO: 1, a histidine (H) at a position in the polypeptide that corresponds to position 283 of SEQ ID NO: 1, an aspartic acid (D) at a position in the polypeptide that corresponds to position 305 of SEQ ID NO: 1, an aspartic acid (D) at a position in the polypeptide that corresponds to position 307 of SEQ ID NO: 1, and/or a lysine (K) at a position in the polypeptide that corresponds to position 115 of SEQ ID NO: 1. In some embodiments, the polypeptide having protease activity comprises an amino acid sequence having at least 50%, at least 60%, at least 70%, at least 80%, at least 81%, at least 82%, at least 83%, at least 84%, at least 85%, at least 86%, at least 87%, at least 88%, at least 89%, at least 90%, at least 91%, at least 92%, at least 93%, at least 94%, at least 95%, at least 96%, at least 97%, at least 98%, or at least 99% sequence identity to SEQ ID NO: 1, provided that the amino acid sequence comprises mutations of S128A, L153P, N162E, H174E, N219G, K229E, H275Y, K324I, F333N, E366K, 177_183KEYQSNKdelinsRDNRDN (SEQ ID NOs: 920 and 919), wherein the positions correspond to SEQ ID NO: 1, and provided that the amino acid sequence comprises a cysteine (C) at a position in the polypeptide that corresponds to position 125 of SEQ ID NO: 1, a histidine (H) at a position in the polypeptide that corresponds to position 283 of SEQ ID NO: 1, an aspartic acid (D) at a position in the polypeptide that corresponds to position 305 of SEQ ID NO: 1, an aspartic acid (D) at a position in the polypeptide that corresponds to position 307 of SEQ ID NO: 1, and/or a lysine (K) at a position in the polypeptide that corresponds to position 115 of SEQ ID NO: 1. In some embodiments, the polypeptide having protease activity comprises an amino acid sequence having at least 50%, at least 60%, at least 70%, at least 80%, at least 81%, at least 82%, at least 83%, at least 84%, at least 85%, at least 86%, at least 87%, at least 88%, at least 89%, at least 90%, at least 91%, at least 92%, at least 93%, at least 94%, at least 95%, at least 96%, at least 97%, at least 98%, or at least 99% sequence identity to SEQ ID NO: 1, provided that the amino acid sequence comprises mutations of S128A, L153P, N162E, H174E, N219G, K229E, H275Y, K324I, F333N, E347N, 177_183KEYQSNKdelinsRDNRDN (SEQ ID NOs: 920 and 919), wherein the positions correspond to SEQ ID NO: 1, and provided that the amino acid sequence comprises a cysteine (C) at a position in the polypeptide that corresponds to position 125 of SEQ ID NO: 1, a histidine (H) at a position in the polypeptide that corresponds to position 283 of SEQ ID NO: 1, an aspartic acid (D) at a position in the polypeptide that corresponds to position 305 of SEQ ID NO: 1, an aspartic acid (D) at a position in the polypeptide that corresponds to position 307 of SEQ ID NO: 1, and/or a lysine (K) at a position in the polypeptide that corresponds to position 115 of SEQ ID NO: 1. In some embodiments, the polypeptide having protease activity comprises an amino acid sequence having at least 50%, at least 60%, at least 70%, at least 80%, at least 81%, at least 82%, at least 83%, at least 84%, at least 85%, at least 86%, at least 87%, at least 88%, at least 89%, at least 90%, at least 91%, at least 92%, at least 93%, at least 94%, at least 95%, at least 96%, at least 97%, at least 98%, or at least 99% sequence identity to SEQ ID NO: 1, provided that the amino acid sequence comprises mutations of T122S, S128A, L153P, N162E, H174E, K196S, N219G, K229E, H275Y, K318A, K324I, F333N, 177_183KEYQSNKdelinsRDNRDN (SEQ ID NOs: 920 and 919), wherein the positions correspond to SEQ ID NO: 1, and provided that the amino acid sequence comprises a cysteine (C) at a position in the polypeptide that corresponds to position 125 of SEQ ID NO: 1, a histidine (H) at a position in the polypeptide that corresponds to position 283 of SEQ ID NO: 1, an aspartic acid (D) at a position in the polypeptide that corresponds to position 305 of SEQ ID NO: 1, an aspartic acid (D) at a position in the polypeptide that corresponds to position 307 of SEQ ID NO: 1, and/or a lysine (K) at a position in the polypeptide that corresponds to position 115 of SEQ ID NO: 1. In some embodiments, the polypeptide having protease activity comprises an amino acid sequence having at least 50%, at least 60%, at least 70%, at least 80%, at least 81%, at least 82%, at least 83%, at least 84%, at least 85%, at least 86%, at least 87%, at least 88%, at least 89%, at least 90%, at least 91%, at least 92%, at least 93%, at least 94%, at least 95%, at least 96%, at least 97%, at least 98%, or at least 99% sequence identity to SEQ ID NO: 1, provided that the amino acid sequence comprises mutations of T122S, S128A, L153P, N162E, H174E, N219G, H222Q, K229E, H275Y, R280E, K324I, F333N, 177_183KEYQSNKdelinsRDNRDN (SEQ ID NOs: 920 and 919), wherein the positions correspond to SEQ ID NO: 1, and provided that the amino acid sequence comprises a cysteine (C) at a position in the polypeptide that corresponds to position 125 of SEQ ID NO: 1, a histidine (H) at a position in the polypeptide that corresponds to position 283 of SEQ ID NO: 1, an aspartic acid (D) at a position in the polypeptide that corresponds to position 305 of SEQ ID NO: 1, an aspartic acid (D) at a position in the polypeptide that corresponds to position 307 of SEQ ID NO: 1, and/or a lysine (K) at a position in the polypeptide that corresponds to position 115 of SEQ ID NO: 1. In some embodiments, the polypeptide having protease activity comprises an amino acid sequence having at least 50%, at least 60%, at least 70%, at least 80%, at least 81%, at least 82%, at least 83%, at least 84%, at least 85%, at least 86%, at least 87%, at least 88%, at least 89%, at least 90%, at least 91%, at least 92%, at least 93%, at least 94%, at least 95%, at least 96%, at least 97%, at least 98%, or at least 99% sequence identity to SEQ ID NO: 1, provided that the amino acid sequence comprises mutations of T122S, S128A, L153P, N162E, H174E, K196S, N219G, H222Q, K229E, H275Y, R280E, K318A, K324I, F333N, 177_183KEYQSNKdelinsRDNRDN (SEQ ID NOs: 920 and 919), wherein the positions correspond to SEQ ID NO: 1, and provided that the amino acid sequence comprises a cysteine (H) at a position in the polypeptide that corresponds to position 283 of SEQ ID NO: 1, an aspartic acid (D) at a position in the polypeptide that corresponds to position 305 of SEQ ID NO: 1, an aspartic acid (D) at a position in the polypeptide that corresponds to position 307 of SEQ ID NO: 1, and/or a lysine (K) at a position in the polypeptide that corresponds to position 115 of SEQ ID NO: 1. In some embodiments, the polypeptide having protease activity comprises an amino acid sequence having at least 50%, at least 60%, at least 70%, at least 80%, at least 81%, at least 82%, at least 83%, at least 84%, at least 85%, at least 86%, at least 87%, at least 88%, at least 89%, at least 90%, at least 91%, at least 92%, at least 93%, at least 94%, at least 95%, at least 96%, at least 97%, at least 98%, or at least 99% sequence identity to SEQ ID NO: 1, provided that the amino acid sequence comprises mutations of S128A, L153P, N162E, H174E, N219G, K229E, H275Y, K324I, F333N, E363K, E366K, 177_183KEYQSNKdelinsRDNRDN (SEQ ID NOs: 920 and 919), wherein the positions correspond to SEQ ID NO: 1, and provided that the amino acid sequence comprises a cysteine (C) at a position in the polypeptide that corresponds to position 125 of SEQ ID NO: 1, a histidine (H) at a position in the polypeptide that corresponds to position 283 of SEQ ID NO: 1, an aspartic acid (D) at a position in the polypeptide that corresponds to position 305 of SEQ ID NO: 1, an aspartic acid (D) at a position in the polypeptide that corresponds to position 307 of SEQ ID NO: 1, and/or a lysine (K) at a position in the polypeptide that corresponds to position 115 of SEQ ID NO: 1. In some embodiments, the polypeptide having protease activity comprises an amino acid sequence having at least 50%, at least 60%, at least 70%, at least 80%, at least 81%, at least 82%, at least 83%, at least 84%, at least 85%, at least 86%, at least 87%, at least 88%, at least 89%, at least 90%, at least 91%, at least 92%, at least 93%, at least 94%, at least 95%, at least 96%, at least 97%, at least 98%, or at least 99% sequence identity to SEQ ID NO: 1, provided that the amino acid sequence comprises mutations of S128A, L153P, N162E, H174E, N219G, K229E, H275Y, K324I, D332K, F333N, E347N, 177_183KEYQSNKdelinsRDNRDN (SEQ ID NOs: 920 and 919), wherein the positions correspond to SEQ ID NO: 1, and provided that the amino acid sequence comprises a cysteine (C) at a position in the polypeptide that corresponds to position 125 of SEQ ID NO: 1, a histidine (H) at a position in the polypeptide that corresponds to position 283 of SEQ ID NO: 1, an aspartic acid (D) at a position in the polypeptide that corresponds to position 305 of SEQ ID NO: 1, an aspartic acid (D) at a position in the polypeptide that corresponds to position 307 of SEQ ID NO: 1, and/or a lysine (K) at a position in the polypeptide that corresponds to position 115 of SEQ ID NO: 1. In some embodiments, the polypeptide having protease activity comprises an amino acid sequence having at least 50%, at least 60%, at least 70%, at least 80%, at least 81%, at least 82%, at least 83%, at least 84%, at least 85%, at least 86%, at least 87%, at least 88%, at least 89%, at least 90%, at least 91%, at least 92%, at least 93%, at least 94%, at least 95%, at least 96%, at least 97%, at least 98%, or at least 99% sequence identity to SEQ ID NO: 1, provided that the amino acid sequence comprises mutations of S128A, L153P, N162E, H174E, N219G, K229E, I254R, H275Y, K324I, D332K, F333N, E347N, E363K, E366K, 177_183KEYQSNKdelinsRDNRDN (SEQ ID NOs: 920 and 919), wherein the positions correspond to SEQ ID NO: 1, and provided that the amino acid sequence comprises a cysteine (C) at a position in the polypeptide that corresponds to position 125 of SEQ ID NO: 1, a histidine (H) at a position in the polypeptide that corresponds to position 283 of SEQ ID NO: 1, an aspartic acid (D) at a position in the polypeptide that corresponds to position 305 of SEQ ID NO: 1, an aspartic acid (D) at a position in the polypeptide that corresponds to position 307 of SEQ ID NO: 1, and/or a lysine (K) at a position in the polypeptide that corresponds to position 115 of SEQ ID NO: 1. In some embodiments, the polypeptide having protease activity comprises an amino acid sequence having at least 50%, at least 60%, at least 70%, at least 80%, at least 81%, at least 82%, at least 83%, at least 84%, at least 85%, at least 86%, at least 87%, at least 88%, at least 89%, at least 90%, at least 91%, at least 92%, at least 93%, at least 94%, at least 95%, at least 96%, at least 97%, at least 98%, or at least 99% sequence identity to SEQ ID NO: 1, provided that the amino acid sequence comprises mutations of C125S, S128A, L153P, N162E, H174E, N219G, K229E, H275Y, K324I, F333N, 177_183KEYQSNKdelinsRDNRDN (SEQ ID NOs: 920 and 919), wherein the positions correspond to SEQ ID NO: 1, and provided that the amino acid sequence comprises a cysteine (C) at a position in the polypeptide that corresponds to position 125 of SEQ ID NO: 1, a histidine (H) at a position in the polypeptide that corresponds to position 283 of SEQ ID NO: 1, an aspartic acid (D) at a position in the polypeptide that corresponds to position 305 of SEQ ID NO: 1, an aspartic acid (D) at a position in the polypeptide that corresponds to position 307 of SEQ ID NO: 1, and/or a lysine (K) at a position in the polypeptide that corresponds to position 115 of SEQ ID NO: 1. In some embodiments, the polypeptide having protease activity comprises an amino acid sequence having at least 50%, at least 60%, at least 70%, at least 80%, at least 81%, at least 82%, at least 83%, at least 84%, at least 85%, at least 86%, at least 87%, at least 88%, at least 89%, at least 90%, at least 91%, at least 92%, at least 93%, at least 94%, at least 95%, at least 96%, at least 97%, at least 98%, or at least 99% sequence identity to SEQ ID NO: 1, provided that the amino acid sequence comprises mutations of S128A, D152N, L153P, N162E, H174E, N219G, K229E, H275Y, K324I, F333N, 177_183KEYQSNKdelinsRDNRDN (SEQ ID NOs: 920 and 919), wherein the positions correspond to SEQ ID NO: 1, and provided that the amino acid sequence comprises a cysteine (C) at a position in the polypeptide that corresponds to position 125 of SEQ ID NO: 1, a histidine (H) at a position in the polypeptide that corresponds to position 283 of SEQ ID NO: 1, an aspartic acid (D) at a position in the polypeptide that corresponds to position 305 of SEQ ID NO: 1, an aspartic acid (D) at a position in the polypeptide that corresponds to position 307 of SEQ ID NO: 1, and/or a lysine (K) at a position in the polypeptide that corresponds to position 115 of SEQ ID NO: 1. In some embodiments, the polypeptide having protease activity comprises an amino acid sequence having at least 50%, at least 60%, at least 70%, at least 80%, at least 81%, at least 82%, at least 83%, at least 84%, at least 85%, at least 86%, at least 87%, at least 88%, at least 89%, at least 90%, at least 91%, at least 92%, at least 93%, at least 94%, at least 95%, at least 96%, at least 97%, at least 98%, or at least 99% sequence identity to SEQ ID NO: 1, provided that the amino acid sequence comprises mutations of S128A, L153P, N162E, H174E, N219G, K229E, H275Y, K324I, F333E, 177_183KEYQSNKdelinsRDNRDN (SEQ ID NOs: 920 and 919), wherein the positions correspond to SEQ ID NO: 1, and provided that the amino acid sequence comprises a cysteine (C) at a position in the polypeptide that corresponds to position 125 of SEQ ID NO: 1, a histidine (H) at a position in the polypeptide that corresponds to position 283 of SEQ ID NO: 1, an aspartic acid (D) at a position in the polypeptide that corresponds to position 305 of SEQ ID NO: 1, an aspartic acid (D) at a position in the polypeptide that corresponds to position 307 of SEQ ID NO: 1, and/or a lysine (K) at a position in the polypeptide that corresponds to position 115 of SEQ ID NO: 1. In some embodiments, the polypeptide having protease activity comprises an amino acid sequence having at least 50%, at least 60%, at least 70%, at least 80%, at least 81%, at least 82%, at least 83%, at least 84%, at least 85%, at least 86%, at least 87%, at least 88%, at least 89%, at least 90%, at least 91%, at least 92%, at least 93%, at least 94%, at least 95%, at least 96%, at least 97%, at least 98%, or at least 99% sequence identity to SEQ ID NO: 1, provided that the amino acid sequence comprises mutations of S128A, L153P, N162E, H174E, H197D, N219G, K229E, H275Y, K324I, F333N, 177_183KEYQSNKdelinsRDNRDN (SEQ ID NOs: 920 and 919), wherein the positions correspond to SEQ ID NO: 1, and provided that the amino acid sequence comprises a cysteine (C) at a position in the polypeptide that corresponds to position 125 of SEQ ID NO: 1, a histidine (H) at a position in the polypeptide that corresponds to position 283 of SEQ ID NO: 1, an aspartic acid (D) at a position in the polypeptide that corresponds to position 305 of SEQ ID NO: 1, an aspartic acid (D) at a position in the polypeptide that corresponds to position 307 of SEQ ID NO: 1, and/or a lysine (K) at a position in the polypeptide that corresponds to position 115 of SEQ ID NO: 1. In some embodiments, the polypeptide having protease activity comprises an amino acid sequence having at least 50%, at least 60%, at least 70%, at least 80%, at least 81%, at least 82%, at least 83%, at least 84%, at least 85%, at least 86%, at least 87%, at least 88%, at least 89%, at least 90%, at least 91%, at least 92%, at least 93%, at least 94%, at least 95%, at least 96%, at least 97%, at least 98%, or at least 99% sequence identity to SEQ ID NO: 1, provided that the amino acid sequence comprises mutations of S128A, L153P, N162E, H174E, N219G, K229E, N233G, H275Y, K324I, D332K, F333N, 177_183KEYQSNKdelinsRDNRDN (SEQ ID NOs: 920 and 919), wherein the positions correspond to SEQ ID NO: 1, and provided that the amino acid sequence comprises a cysteine (C) at a position in the polypeptide that corresponds to position 125 of SEQ ID NO: 1, a histidine (H) at a position in the polypeptide that corresponds to position 283 of SEQ ID NO: 1, an aspartic acid (D) at a position in the polypeptide that corresponds to position 305 of SEQ ID NO: 1, an aspartic acid (D) at a position in the polypeptide that corresponds to position 307 of SEQ ID NO: 1, and/or a lysine (K) at a position in the polypeptide that corresponds to position 115 of SEQ ID NO: 1. In some embodiments, the polypeptide having protease activity comprises an amino acid sequence having at least 50%, at least 60%, at least 70%, at least 80%, at least 81%, at least 82%, at least 83%, at least 84%, at least 85%, at least 86%, at least 87%, at least 88%, at least 89%, at least 90%, at least 91%, at least 92%, at least 93%, at least 94%, at least 95%, at least 96%, at least 97%, at least 98%, or at least 99% sequence identity to SEQ ID NO: 1, provided that the amino acid sequence comprises mutations of S128A, L153P, N162E, N219Q, K229E, R280T, K324I, F333N, wherein the positions correspond to SEQ ID NO: 1, and provided that the amino acid sequence comprises a cysteine (C) at a position in the polypeptide that corresponds to position 125 of SEQ ID NO: 1, a histidine (H) at a position in the polypeptide that corresponds to position 283 of SEQ ID NO: 1, an aspartic acid (D) at a position in the polypeptide that corresponds to position 305 of SEQ ID NO: 1, an aspartic acid (D) at a position in the polypeptide that corresponds to position 307 of SEQ ID NO: 1, and/or a lysine (K) at a position in the polypeptide that corresponds to position 115 of SEQ ID NO: 1. In some embodiments, the polypeptide having protease activity comprises an amino acid sequence having at least 50%, at least 60%, at least 70%, at least 80%, at least 81%, at least 82%, at least 83%, at least 84%, at least 85%, at least 86%, at least 87%, at least 88%, at least 89%, at least 90%, at least 91%, at least 92%, at least 93%, at least 94%, at least 95%, at least 96%, at least 97%, at least 98%, or at least 99% sequence identity to SEQ ID NO: 1, provided that the amino acid sequence comprises mutations of S128A, L153P, N162E, N219Q, K229E, R280T, D307N, K324I, F333N, wherein the positions correspond to SEQ ID NO: 1, and provided that the amino acid sequence comprises a cysteine (C) at a position in the polypeptide that corresponds to position 125 of SEQ ID NO: 1, a histidine (H) at a position in the polypeptide that corresponds to position 283 of SEQ ID NO: 1, an aspartic acid (D) at a position in the polypeptide that corresponds to position 305 of SEQ ID NO: 1, an aspartic acid (D) at a position in the polypeptide that corresponds to position 307 of SEQ ID NO: 1, and/or a lysine (K) at a position in the polypeptide that corresponds to position 115 of SEQ ID NO: 1.

[0066] In some embodiments, the polypeptide having protease activity comprises an amino acid sequence having at least 50%, at least 51%, at least 52%, at least 53%, at least 54%, at least 55%, at least 56%, at least 57%, at least 58%, at least 59%, at least 60%, at least 61%, at least 62%, at least 63%, at least 64%, at least 65%, at least 66%, at least 67%, at least 68%, at least 69%, at least 70%, at least 71%, at least 72%, at least 73%, at least 74%, at least 75%, at least 76%, at least 77%, at least 78%, at least 79%, at least 80%, at least 81%, at least 82%, at least 83%, at least 84%, at least 85%, at least 86%, at least 87%, at least 88%, at least 89%, at least 90%, at least 91%, at least 92%, at least 93%, at least 94%, at least 95%, at least 96%, at least 97%, at least 98%, or at least 99% sequence identity to any one sequence provided in Table 2.

TABLE 2

| | Polypeptide having IgE |
|---|---|
| ID | protease activity Seq |
| PRT-1 | SEQ ID NO: 3 |
| PRT-2 | SEQ ID NO: 4 |
| PRT-3 | SEQ ID NO: 5 |
| PRT-4 | SEQ ID NO: 6 |
| PRT-5 | SEQ ID NO: 7 |
| PRT-6 | SEQ ID NO: 8 |
| PRT-7 | SEQ ID NO: 9 |
| PRT-8 | SEQ ID NO: 10 |
| PRT-9 | SEQ ID NO: 11 |
| PRT-10 | SEQ ID NO: 12 |
| PRT-11 | SEQ ID NO: 13 |
| PRT-12 | SEQ ID NO: 14 |
| PRT-13 | SEQ ID NO: 15 |
| PRT-14 | SEQ ID NO: 16 |
| PRT-15 | SEQ ID NO: 17 |
| PRT-16 | SEQ ID NO: 18 |
| PRT-17 | SEQ ID NO: 19 |
| PRT-18 | SEQ ID NO: 20 |
| PRT-19 | SEQ ID NO: 21 |
| PRT-20 | SEQ ID NO: 22 |
| PRT-21 | SEQ ID NO: 23 |
| PRT-22 | SEQ ID NO: 24 |
| PRT-23 | SEQ ID NO: 25 |
| PRT-24 | SEQ ID NO: 26 |
| PRT-25 | SEQ ID NO: 27 |
| PRT-26 | SEQ ID NO: 28 |
| PRT-27 | SEQ ID NO: 29 |
| PRT-28 | SEQ ID NO: 30 |
| PRT-29 | SEQ ID NO: 31 |
| PRT-30 | SEQ ID NO: 32 |
| PRT-31 | SEQ ID NO: 33 |
| PRT-32 | SEQ ID NO: 34 |
| PRT-33 | SEQ ID NO: 35 |
| PRT-34 | SEQ ID NO: 36 |
| PRT-35 | SEQ ID NO: 37 |
| PRT-36 | SEQ ID NO: 38 |
| PRT-37 | SEQ ID NO: 39 |
| PRT-38 | SEQ ID NO: 40 |
| PRT-39 | SEQ ID NO: 41 |
| PRT-40 | SEQ ID NO: 42 |
| PRT-41 | SEQ ID NO: 43 |
| PRT-42 | SEQ ID NO: 44 |
| PRT-43 | SEQ ID NO: 45 |
| PRT-44 | SEQ ID NO: 46 |
| PRT-45 | SEQ ID NO: 47 |
| PRT-46 | SEQ ID NO: 48 |
| PRT-47 | SEQ ID NO: 49 |
| PRT-48 | SEQ ID NO: 50 |
| PRT-49 | SEQ ID NO: 51 |
| PRT-50 | SEQ ID NO: 52 |
| PRT-51 | SEQ ID NO: 53 |
| PRT-52 | SEQ ID NO: 54 |
| PRT-53 | SEQ ID NO: 55 |
| PRT-54 | SEQ ID NO: 56 |
| PRT-55 | SEQ ID NO: 57 |
| PRT-56 | SEQ ID NO: 58 |
| PRT-57 | SEQ ID NO: 59 |
| PRT-58 | SEQ ID NO: 60 |
| PRT-59 | SEQ ID NO: 61 |
| PRT-60 | SEQ ID NO: 62 |
| PRT-61 | SEQ ID NO: 63 |
| PRT-62 | SEQ ID NO: 64 |
| PRT-63 | SEQ ID NO: 65 |
| PRT-64 | SEQ ID NO: 66 |
| PRT-65 | SEQ ID NO: 67 |
| PRT-66 | SEQ ID NO: 68 |
| PRT-67 | SEQ ID NO: 69 |
| PRT-68 | SEQ ID NO: 70 |
| PRT-69 | SEQ ID NO: 71 |
| PRT-70 | SEQ ID NO: 72 |
| PRT-71 | SEQ ID NO: 73 |
| PRT-72 | SEQ ID NO: 74 |
| PRT-73 | SEQ ID NO: 75 |
| PRT-74 | SEQ ID NO: 76 |
| PRT-75 | SEQ ID NO: 77 |
| PRT-76 | SEQ ID NO: 78 |
| PRT-77 | SEQ ID NO: 79 |
| PRT-78 | SEQ ID NO: 80 |
| PRT-79 | SEQ ID NO: 81 |
| PRT-80 | SEQ ID NO: 82 |
| PRT-81 | SEQ ID NO: 83 |
| PRT-82 | SEQ ID NO: 84 |
| PRT-83 | SEQ ID NO: 85 |
| PRT-84 | SEQ ID NO: 86 |
| PRT-85 | SEQ ID NO: 87 |
| PRT-86 | SEQ ID NO: 88 |
| PRT-87 | SEQ ID NO: 89 |
| PRT-88 | SEQ ID NO: 90 |
| PRT-89 | SEQ ID NO: 91 |
| PRT-90 | SEQ ID NO: 92 |
| PRT-91 | SEQ ID NO: 93 |
| PRT-94 | SEQ ID NO: 96 |
| PRT-95 | SEQ ID NO: 97 |
| PRT-96 | SEQ ID NO: 98 |
| PRT-97 | SEQ ID NO: 99 |
| PRT-98 | SEQ ID NO: 100 |
| PRT-99 | SEQ ID NO: 101 |
| PRT-100 | SEQ ID NO: 102 |
| PRT-101 | SEQ ID NO: 103 |
| PRT-102 | SEQ ID NO: 104 |
| PRT-103 | SEQ ID NO: 105 |
| PRT-104 | SEQ ID NO: 106 |
| PRT-105 | SEQ ID NO: 107 |
| PRT-106 | SEQ ID NO: 108 |
| PRT-107 | SEQ ID NO: 109 |
| PRT-108 | SEQ ID NO: 110 |
| PRT-109 | SEQ ID NO: 111 |
| PRT-110 | SEQ ID NO: 112 |
| PRT-111 | SEQ ID NO: 113 |
| PRT-112 | SEQ ID NO: 114 |
| PRT-113 | SEQ ID NO: 115 |
| PRT-114 | SEQ ID NO: 116 |
| PRT-115 | SEQ ID NO: 117 |
| PRT-116 | SEQ ID NO: 118 |
| PRT-117 | SEQ ID NO: 119 |
| PRT-118 | SEQ ID NO: 120 |
| PRT-119 | SEQ ID NO: 121 |
| PRT-120 | SEQ ID NO: 122 |
| PRT-121 | SEQ ID NO: 123 |
| PRT-122 | SEQ ID NO: 124 |
| PRT-123 | SEQ ID NO: 125 |
| PRT-124 | SEQ ID NO: 126 |
| PRT-125 | SEQ ID NO: 127 |
| PRT-126 | SEQ ID NO: 128 |
| PRT-127 | SEQ ID NO: 129 |
| PRT-128 | SEQ ID NO: 130 |
| PRT-129 | SEQ ID NO: 131 |
| PRT-130 | SEQ ID NO: 132 |
| PRT-131 | SEQ ID NO: 133 |
| PRT-132 | SEQ ID NO: 134 |
| PRT-133 | SEQ ID NO: 135 |
| PRT-134 | SEQ ID NO: 136 |
| PRT-135 | SEQ ID NO: 137 |
| PRT-136 | SEQ ID NO: 138 |
| PRT-137 | SEQ ID NO: 139 |
| PRT-138 | SEQ ID NO: 140 |
| PRT-139 | SEQ ID NO: 141 |
| PRT-140 | SEQ ID NO: 142 |
| PRT-141 | SEQ ID NO: 143 |
| PRT-142 | SEQ ID NO: 144 |
| PRT-143 | SEQ ID NO: 145 |
| PRT-144 | SEQ ID NO: 146 |
| PRT-145 | SEQ ID NO: 147 |
| PRT-146 | SEQ ID NO: 148 |
| PRT-147 | SEQ ID NO: 149 |
| PRT-148 | SEQ ID NO: 150 |
| PRT-149 | SEQ ID NO: 151 |
| PRT-150 | SEQ ID NO: 152 |
| PRT-151 | SEQ ID NO: 153 |
| PRT-152 | SEQ ID NO: 154 |
| PRT-153 | SEQ ID NO: 155 |
| PRT-154 | SEQ ID NO: 156 |
| PRT-155 | SEQ ID NO: 157 |
| PRT-156 | SEQ ID NO: 158 |
| PRT-157 | SEQ ID NO: 159 |
| PRT-158 | SEQ ID NO: 160 |
| PRT-159 | SEQ ID NO: 161 |
| PRT-160 | SEQ ID NO: 162 |
| PRT-161 | SEQ ID NO: 163 |
| PRT-162 | SEQ ID NO: 164 |
| PRT-163 | SEQ ID NO: 165 |
| PRT-164 | SEQ ID NO: 166 |
| PRT-165 | SEQ ID NO: 167 |
| PRT-166 | SEQ ID NO: 168 |
| PRT-167 | SEQ ID NO: 169 |
| PRT-168 | SEQ ID NO: 170 |
| PRT-169 | SEQ ID NO: 171 |
| PRT-170 | SEQ ID NO: 172 |
| PRT-171 | SEQ ID NO: 173 |
| PRT-172 | SEQ ID NO: 174 |
| PRT-173 | SEQ ID NO: 175 |
| PRT-174 | SEQ ID NO: 176 |
| PRT-175 | SEQ ID NO: 177 |
| PRT-176 | SEQ ID NO: 178 |
| PRT-177 | SEQ ID NO: 179 |
| PRT-178 | SEQ ID NO: 180 |
| PRT-179 | SEQ ID NO: 181 |
| PRT-180 | SEQ ID NO: 182 |
| PRT-181 | SEQ ID NO: 183 |
| PRT-182 | SEQ ID NO: 184 |
| PRT-183 | SEQ ID NO: 185 |
| PRT-184 | SEQ ID NO: 186 |
| PRT-185 | SEQ ID NO: 187 |
| PRT-186 | SEQ ID NO: 188 |
| PRT-187 | SEQ ID NO: 189 |
| PRT-188 | SEQ ID NO: 190 |
| PRT-189 | SEQ ID NO: 191 |
| PRT-190 | SEQ ID NO: 192 |
| PRT-191 | SEQ ID NO: 193 |
| PRT-192 | SEQ ID NO: 194 |
| PRT-193 | SEQ ID NO: 195 |
| PRT-194 | SEQ ID NO: 196 |
| PRT-195 | SEQ ID NO: 197 |
| PRT-196 | SEQ ID NO: 198 |
| PRT-197 | SEQ ID NO: 199 |
| PRT-198 | SEQ ID NO: 200 |
| PRT-199 | SEQ ID NO: 201 |
| PRT-200 | SEQ ID NO: 202 |
| PRT-201 | SEQ ID NO: 203 |
| PRT-202 | SEQ ID NO: 204 |
| PRT-203 | SEQ ID NO: 205 |
| PRT-204 | SEQ ID NO: 206 |
| PRT-205 | SEQ ID NO: 207 |
| PRT-206 | SEQ ID NO: 208 |
| PRT-207 | SEQ ID NO: 209 |
| PRT-208 | SEQ ID NO: 210 |
| PRT-209 | SEQ ID NO: 211 |
| PRT-210 | SEQ ID NO: 212 |
| PRT-211 | SEQ ID NO: 213 |
| PRT-212 | SEQ ID NO: 214 |
| PRT-213 | SEQ ID NO: 215 |
| PRT-214 | SEQ ID NO: 216 |
| PRT-215 | SEQ ID NO: 217 |
| PRT-216 | SEQ ID NO: 218 |
| PRT-217 | SEQ ID NO: 219 |
| PRT-218 | SEQ ID NO: 220 |
| PRT-219 | SEQ ID NO: 221 |
| PRT-220 | SEQ ID NO: 222 |
| PRT-221 | SEQ ID NO: 223 |
| PRT-222 | SEQ ID NO: 224 |
| PRT-223 | SEQ ID NO: 225 |
| PRT-224 | SEQ ID NO: 226 |
| PRT-225 | SEQ ID NO: 227 |
| PRT-226 | SEQ ID NO: 228 |
| PRT-227 | SEQ ID NO: 229 |
| PRT-228 | SEQ ID NO: 230 |
| PRT-229 | SEQ ID NO: 231 |
| PRT-230 | SEQ ID NO: 232 |
| PRT-231 | SEQ ID NO: 233 |
| PRT-232 | SEQ ID NO: 234 |
| PRT-233 | SEQ ID NO: 235 |
| PRT-234 | SEQ ID NO: 236 |
| PRT-235 | SEQ ID NO: 237 |
| PRT-236 | SEQ ID NO: 238 |
| PRT-237 | SEQ ID NO: 239 |
| PRT-238 | SEQ ID NO: 240 |
| PRT-239 | SEQ ID NO: 241 |
| PRT-240 | SEQ ID NO: 242 |
| PRT-241 | SEQ ID NO: 243 |
| PRT-242 | SEQ ID NO: 247 |
| PRT-243 | SEQ ID NO: 251 |
| PRT-244 | SEQ ID NO: 280 |
| PRT-245 | SEQ ID NO: 281 |
| PRT-246 | SEQ ID NO: 282 |
| PRT-247 | SEQ ID NO: 283 |
| PRT-248 | SEQ ID NO: 284 |
| PRT-249 | SEQ ID NO: 285 |
| PRT-250 | SEQ ID NO: 286 |
| PRT-251 | SEQ ID NO: 287 |
| PRT-252 | SEQ ID NO: 288 |
| PRT-253 | SEQ ID NO: 289 |
| PRT-254 | SEQ ID NO: 290 |
| PRT-255 | SEQ ID NO: 291 |
| PRT-256 | SEQ ID NO: 292 |
| PRT-257 | SEQ ID NO: 293 |
| PRT-258 | SEQ ID NO: 294 |
| PRT-259 | SEQ ID NO: 295 |
| PRT-260 | SEQ ID NO: 296 |
| PRT-261 | SEQ ID NO: 297 |
| PRT-262 | SEQ ID NO: 298 |
| PRT-263 | SEQ ID NO: 299 |
| PRT-264 | SEQ ID NO: 300 |
| PRT-265 | SEQ ID NO: 301 |
| PRT-266 | SEQ ID NO: 302 |
| PRT-267 | SEQ ID NO: 303 |
| PRT-268 | SEQ ID NO: 304 |
| PRT-269 | SEQ ID NO: 305 |
| PRT-270 | SEQ ID NO: 306 |
| PRT-271 | SEQ ID NO: 307 |
| PRT-272 | SEQ ID NO: 308 |
| PRT-273 | SEQ ID NO: 309 |
| PRT-274 | SEQ ID NO: 310 |
| PRT-275 | SEQ ID NO: 311 |
| PRT-276 | SEQ ID NO: 312 |
| PRT-277 | SEQ ID NO: 313 |
| PRT-278 | SEQ ID NO: 314 |
| PRT-279 | SEQ ID NO: 315 |
| PRT-280 | SEQ ID NO: 316 |
| PRT-281 | SEQ ID NO: 317 |
| PRT-282 | SEQ ID NO: 318 |
| PRT-283 | SEQ ID NO: 319 |
| PRT-284 | SEQ ID NO: 320 |
| PRT-285 | SEQ ID NO: 321 |
| PRT-286 | SEQ ID NO: 322 |
| PRT-287 | SEQ ID NO: 323 |
| PRT-288 | SEQ ID NO: 324 |
| PRT-289 | SEQ ID NO: 325 |
| PRT-290 | SEQ ID NO: 326 |
| PRT-291 | SEQ ID NO: 327 |
| PRT-292 | SEQ ID NO: 328 |
| PRT-293 | SEQ ID NO: 329 |
| PRT-294 | SEQ ID NO: 330 |
| PRT-295 | SEQ ID NO: 331 |
| PRT-296 | SEQ ID NO: 332 |
| PRT-297 | SEQ ID NO: 333 |
| PRT-298 | SEQ ID NO: 334 |
| PRT-299 | SEQ ID NO: 335 |
| PRT-300 | SEQ ID NO: 336 |
| PRT-301 | SEQ ID NO: 337 |
| PRT-302 | SEQ ID NO: 338 |
| PRT-303 | SEQ ID NO: 339 |
| PRT-304 | SEQ ID NO: 340 |
| PRT-305 | SEQ ID NO: 341 |
| PRT-306 | SEQ ID NO: 342 |
| PRT-307 | SEQ ID NO: 343 |
| PRT-308 | SEQ ID NO: 344 |
| PRT-309 | SEQ ID NO: 345 |
| PRT-310 | SEQ ID NO: 346 |
| PRT-311 | SEQ ID NO: 347 |
| PRT-312 | SEQ ID NO: 348 |
| PRT-313 | SEQ ID NO: 349 |
| PRT-314 | SEQ ID NO: 350 |
| PRT-315 | SEQ ID NO: 351 |
| PRT-316 | SEQ ID NO: 352 |
| PRT-317 | SEQ ID NO: 353 |
| PRT-318 | SEQ ID NO: 354 |
| PRT-319 | SEQ ID NO: 355 |
| PRT-320 | SEQ ID NO: 356 |
| PRT-321 | SEQ ID NO: 357 |
| PRT-322 | SEQ ID NO: 358 |
| PRT-323 | SEQ ID NO: 359 |
| PRT-324 | SEQ ID NO: 360 |
| PRT-325 | SEQ ID NO: 361 |
| PRT-326 | SEQ ID NO: 362 |
| PRT-327 | SEQ ID NO: 363 |
| PRT-328 | SEQ ID NO: 364 |
| PRT-329 | SEQ ID NO: 365 |
| PRT-330 | SEQ ID NO: 366 |
| PRT-331 | SEQ ID NO: 367 |
| PRT-332 | SEQ ID NO: 368 |
| PRT-333 | SEQ ID NO: 369 |
| PRT-334 | SEQ ID NO: 370 |
| PRT-335 | SEQ ID NO: 371 |
| PRT-336 | SEQ ID NO: 372 |
| PRT-337 | SEQ ID NO: 373 |
| PRT-338 | SEQ ID NO: 374 |
| PRT-339 | SEQ ID NO: 375 |
| PRT-340 | SEQ ID NO: 376 |
| PRT-341 | SEQ ID NO: 377 |
| PRT-342 | SEQ ID NO: 378 |
| PRT-343 | SEQ ID NO: 379 |
| PRT-344 | SEQ ID NO: 380 |
| PRT-345 | SEQ ID NO: 381 |
| PRT-346 | SEQ ID NO: 382 |
| PRT-347 | SEQ ID NO: 383 |
| PRT-348 | SEQ ID NO: 384 |
| PRT-349 | SEQ ID NO: 385 |
| PRT-350 | SEQ ID NO: 386 |
| PRT-351 | SEQ ID NO: 387 |
| PRT-352 | SEQ ID NO: 388 |
| PRT-353 | SEQ ID NO: 389 |
| PRT-354 | SEQ ID NO: 390 |
| PRT-355 | SEQ ID NO: 391 |
| PRT-356 | SEQ ID NO: 392 |
| PRT-357 | SEQ ID NO: 393 |
| PRT-358 | SEQ ID NO: 394 |
| PRT-359 | SEQ ID NO: 395 |
| PRT-360 | SEQ ID NO: 396 |
| PRT-361 | SEQ ID NO: 397 |
| PRT-362 | SEQ ID NO: 398 |
| PRT-363 | SEQ ID NO: 399 |
| PRT-364 | SEQ ID NO: 400 |
| PRT-365 | SEQ ID NO: 401 |
| PRT-366 | SEQ ID NO: 402 |
| PRT-367 | SEQ ID NO: 403 |
| PRT-368 | SEQ ID NO: 404 |
| PRT-369 | SEQ ID NO: 405 |
| PRT-370 | SEQ ID NO: 406 |
| PRT-371 | SEQ ID NO: 407 |
| PRT-372 | SEQ ID NO: 408 |
| PRT-373 | SEQ ID NO: 409 |
| PRT-374 | SEQ ID NO: 410 |
| PRT-375 | SEQ ID NO: 411 |
| PRT-376 | SEQ ID NO: 412 |
| PRT-377 | SEQ ID NO: 413 |
| PRT-378 | SEQ ID NO: 414 |
| PRT-379 | SEQ ID NO: 415 |
| PRT-380 | SEQ ID NO: 416 |
| PRT-381 | SEQ ID NO: 417 |
| PRT-382 | SEQ ID NO: 418 |
| PRT-383 | SEQ ID NO: 419 |
| PRT-384 | SEQ ID NO: 420 |
| PRT-385 | SEQ ID NO: 421 |
| PRT-386 | SEQ ID NO: 422 |
| PRT-387 | SEQ ID NO: 423 |
| PRT-388 | SEQ ID NO: 424 |
| PRT-389 | SEQ ID NO: 425 |
| PRT-390 | SEQ ID NO: 426 |
| PRT-391 | SEQ ID NO: 427 |
| PRT-392 | SEQ ID NO: 428 |
| PRT-393 | SEQ ID NO: 429 |
| PRT-394 | SEQ ID NO: 430 |
| PRT-395 | SEQ ID NO: 431 |
| PRT-396 | SEQ ID NO: 432 |
| PRT-397 | SEQ ID NO: 433 |
| PRT-398 | SEQ ID NO: 434 |
| PRT-399 | SEQ ID NO: 435 |
| PRT-400 | SEQ ID NO: 436 |
| PRT-401 | SEQ ID NO: 437 |
| PRT-402 | SEQ ID NO: 438 |
| PRT-403 | SEQ ID NO: 439 |
| PRT-404 | SEQ ID NO: 440 |
| PRT-405 | SEQ ID NO: 441 |
| PRT-406 | SEQ ID NO: 442 |
| PRT-407 | SEQ ID NO: 443 |
| PRT-408 | SEQ ID NO: 444 |
| PRT-409 | SEQ ID NO: 445 |
| PRT-410 | SEQ ID NO: 446 |
| PRT-411 | SEQ ID NO: 447 |
| PRT-412 | SEQ ID NO: 448 |
| PRT-413 | SEQ ID NO: 449 |
| PRT-414 | SEQ ID NO: 450 |
| PRT-415 | SEQ ID NO: 451 |
| PRT-416 | SEQ ID NO: 452 |
| PRT-417 | SEQ ID NO: 453 |
| PRT-418 | SEQ ID NO: 454 |
| PRT-419 | SEQ ID NO: 455 |
| PRT-420 | SEQ ID NO: 456 |
| PRT-421 | SEQ ID NO: 457 |
| PRT-422 | SEQ ID NO: 458 |
| PRT-423 | SEQ ID NO: 459 |
| PRT-424 | SEQ ID NO: 460 |
| PRT-425 | SEQ ID NO: 461 |
| PRT-426 | SEQ ID NO: 462 |
| PRT-427 | SEQ ID NO: 463 |
| PRT-428 | SEQ ID NO: 464 |
| PRT-429 | SEQ ID NO: 465 |
| PRT-430 | SEQ ID NO: 466 |
| PRT-431 | SEQ ID NO: 467 |
| PRT-432 | SEQ ID NO: 468 |
| PRT-433 | SEQ ID NO: 469 |
| PRT-434 | SEQ ID NO: 470 |
| PRT-435 | SEQ ID NO: 471 |
| PRT-436 | SEQ ID NO: 472 |
| PRT-437 | SEQ ID NO: 473 |
| PRT-438 | SEQ ID NO: 474 |
| PRT-439 | SEQ ID NO: 475 |
| PRT-440 | SEQ ID NO: 476 |
| PRT-441 | SEQ ID NO: 477 |
| PRT-442 | SEQ ID NO: 478 |
| PRT-443 | SEQ ID NO: 479 |
| PRT-444 | SEQ ID NO: 480 |
| PRT-445 | SEQ ID NO: 481 |
| PRT-446 | SEQ ID NO: 482 |
| PRT-447 | SEQ ID NO: 483 |
| PRT-448 | SEQ ID NO: 484 |
| PRT-449 | SEQ ID NO: 485 |
| PRT-450 | SEQ ID NO: 486 |
| PRT-451 | SEQ ID NO: 487 |
| PRT-452 | SEQ ID NO: 488 |
| PRT-453 | SEQ ID NO: 489 |
| PRT-454 | SEQ ID NO: 490 |
| PRT-455 | SEQ ID NO: 491 |
| PRT-456 | SEQ ID NO: 492 |
| PRT-457 | SEQ ID NO: 493 |
| PRT-458 | SEQ ID NO: 494 |
| PRT-459 | SEQ ID NO: 495 |
| PRT-460 | SEQ ID NO: 496 |
| PRT-461 | SEQ ID NO: 497 |
| PRT-462 | SEQ ID NO: 498 |
| PRT-463 | SEQ ID NO: 499 |
| PRT-464 | SEQ ID NO: 500 |
| PRT-465 | SEQ ID NO: 501 |
| PRT-466 | SEQ ID NO: 502 |
| PRT-467 | SEQ ID NO: 503 |
| PRT-468 | SEQ ID NO: 504 |
| PRT-469 | SEQ ID NO: 505 |
| PRT-470 | SEQ ID NO: 506 |
| PRT-471 | SEQ ID NO: 507 |
| PRT-472 | SEQ ID NO: 508 |
| PRT-473 | SEQ ID NO: 509 |
| PRT-474 | SEQ ID NO: 510 |
| PRT-475 | SEQ ID NO: 511 |
| PRT-476 | SEQ ID NO: 512 |
| PRT-477 | SEQ ID NO: 513 |
| PRT-478 | SEQ ID NO: 514 |
| PRT-479 | SEQ ID NO: 515 |
| PRT-480 | SEQ ID NO: 516 |
| PRT-481 | SEQ ID NO: 517 |
| PRT-482 | SEQ ID NO: 518 |
| PRT-483 | SEQ ID NO: 519 |
| PRT-484 | SEQ ID NO: 520 |
| PRT-485 | SEQ ID NO: 521 |
| PRT-486 | SEQ ID NO: 522 |
| PRT-487 | SEQ ID NO: 523 |
| PRT-488 | SEQ ID NO: 524 |
| PRT-489 | SEQ ID NO: 525 |
| PRT-490 | SEQ ID NO: 526 |
| PRT-491 | SEQ ID NO: 527 |
| PRT-492 | SEQ ID NO: 528 |
| PRT-493 | SEQ ID NO: 737 |

X in the sequences provided in the rows above may be methionine M, a signal peptide, or absent. The signal sequence may be, for example, the amino acid sequence of METDTLLLWVLLLWVPGSTG (SEQ ID NO: 244).

[0067] In some embodiments, the polypeptide having protease activity comprises an amino acid sequence having at least 50%, at least 60%, at least 70%, at least 80%, at least 81%, at least 82%, at least 83%, at least 84%, at least 85%, at least 86%, at least 87%, at least 88%, at least 89%, at least 90%, at least 91%, at least 92%, at least 93%, at least 94%, at least 95%, at least 96%, at least 97%, at least 98%, or at least 99% sequence identity to any one of SEQ ID NO: 380, 251, 5-243, 247, 280-379, 381-528, 737, 745-823, 828-864, or 885-916. In some embodiments, the polypeptide having protease activity comprises an amino acid sequence having at least 50%, at least 60%, at least 70%, at least 80%, at least 81%, at least 82%, at least 83%, at least 84%, at least 85%, at least 86%, at least 87%, at least 88%, at least 89%, at least 90%, at least 91%, at least 92%, at least 93%, at least 94%, at least 95%, at least 96%, at least 97%, at least 98%, or at least 99% sequence identity to any one of SEQ ID NO: 380, 251, 5-243, 247, 280-379, 381-528, 737, 745-823, 828-864, or 885-916, wherein X comprises a Methionine (M), a signal peptide, or is absent. In some embodiments, the signal peptide comprises an amino acid sequence of METDTLLLWVLLLWVPGSTG (SEQ ID NO: 244).

[0068] In some embodiments, the polypeptide having protease activity comprises an amino acid sequence having at least 50%, at least 60%, at least 70%, at least 80%, at least 81%, at least 82%, at least 83%, at least 84%, at least 85%, at least 86%, at least 87%, at least 88%, at least 89%, at least 90%, at least 91%, at least 92%, at least 93%, at least 94%, at least 95%, at least 96%, at least 97%, at least 98%, or at least 99% sequence identity to any one of SEQ ID NO: 380, 251, 5-243, 247, 280-379, 381-528, 737, 745-823, 828-864, or 885-916, wherein X comprises a Methionine (M).

[0069] In some embodiments, the polypeptide having protease activity comprises an amino acid sequence having at least 50%, at least 60%, at least 70%, at least 80%, at least 81%, at least 82%, at least 83%, at least 84%, at least 85%, at least 86%, at least 87%, at least 88%, at least 89%, at least 90%, at least 91%, at least 92%, at least 93%, at least 94%, at least 95%, at least 96%, at least 97%, at least 98%, or at least 99% sequence identity to any one of SEQ ID NO: 3-243, 247, 251, 280-373, 382-528, or 737, wherein X comprises a signal peptide having an amino acid sequence of SEQ ID NO: 244.

[0070] In some embodiments, the polypeptide having protease activity comprises an amino acid sequence having at least 50%, at least 60%, at least 70%, at least 80%, at least 81%, at least 82%, at least 83%, at least 84%, at least 85%, at least 86%, at least 87%, at least 88%, at least 89%, at least 90%, at least 91%, at least 92%, at least 93%, at least 94%, at least 95%, at least 96%, at least 97%, at least 98%, or at least 99% sequence identity to any one of SEQ ID NO: 3-243, 247, 251, 280-373, 382-528, or 737, wherein X is absent.

[0071] In some embodiments, the polypeptide having protease activity comprises an amino acid sequence having at least 50%, at least 60%, at least 70%, at least 80%, at least 81%, at least 82%, at least 83%, at least 84%, at least 85%, at least 86%, at least 87%, at least 88%, at least 89%, at least 90%, at least 91%, at least 92%, at least 93%, at least 94%, at least 95%, at least 96%, at least 97%, at least 98%, or at least 99% sequence identity to any one of SEQ ID NO: 3-243, 247, 251, 280-373, 382-528, or 737, wherein X comprises a Methionine (M), a signal peptide, or is absent, and wherein the polypeptide further comprises a His-tag at the C-terminal of the polypeptide. In some embodiments, the His-tag comprises an amino acid sequence of LEHHHHHH (SEQ ID NO: 245). In some embodiments, the polypeptide having protease activity comprises an amino acid sequence having at least 50%, at least 60%, at least 70%, at least 80%, at least 81%, at least 82%, at least 83%, at least 84%, at least 85%, at least 86%, at least 87%, at least 88%, at least 89%, at least 90%, at least 91%, at least 92%, at least 93%, at least 94%, at least 95%, at least 96%, at least 97%, at least 98%, or at least 99% sequence identity to any one of SEQ ID NO: 3-243, 247, 251, 280-373, 382-528, or 737, wherein X comprises a Methionine (M), a signal peptide, or is absent, and wherein the polypeptide further comprises a His-tag having the amino acid sequence of SEQ ID NO: 245 at the C-terminal of the polypeptide.

[0072] In some embodiments, the polypeptide having protease activity comprises an amino acid sequence having at least 50%, at least 60%, at least 70%, at least 80%, at least 81%, at least 82%, at least 83%, at least 84%, at least 85%, at least 86%, at least 87%, at least 88%, at least 89%, at least 90%, at least 91%, at least 92%, at least 93%, at least 94%, at least 95%, at least 96%, at least 97%, at least 98%, or at least 99% sequence identity to SEQ ID NO: 380, 251, 5-243, 247, 280-379, 381-528, 737, 745-823, 828-864, or 885-916.

[0073] In some embodiments, the polypeptide having protease activity comprises an amino acid sequence having at least 50%, at least 60%, at least 70%, at least 80%, at least 81%, at least 82%, at least 83%, at least 84%, at least 85%, at least 86%, at least 87%, at least 88%, at least 89%, at least 90%, at least 91%, at least 92%, at least 93%, at least 94%, at least 95%, at least 96%, at least 97%, at least 98%, or at least 99% sequence identity to SEQ ID NO: 3. In some embodiments, the polypeptide having protease activity comprises an amino acid sequence having at least 50%, at least 60%, at least 70%, at least 80%, at least 81%, at least 82%, at least 83%, at least 84%, at least 85%, at least 86%, at least 87%, at least 88%, at least 89%, at least 90%, at least 91%, at least 92%, at least 93%, at least 94%, at least 95%, at least 96%, at least 97%, at least 98%, or at least 99% sequence identity to SEQ ID NO: 4. In some embodiments, the polypeptide having protease activity comprises an amino acid sequence having at least 50%, at least 60%, at least 70%, at least 80%, at least 81%, at least 82%, at least 83%, at least 84%, at least 85%, at least 86%, at least 87%, at least 88%, at least 89%, at least 90%, at least 91%, at least 92%, at least 93%, at least 94%, at least 95%, at least 96%, at least 97%, at least 98%, or at least 99% sequence identity to SEQ ID NO: 5. In some embodiments, the polypeptide having protease activity comprises an amino acid sequence having at least 50%, at least 60%, at least 70%, at least 80%, at least 81%, at least 82%, at least 83%, at least 84%, at least 85%, at least 86%, at least 87%, at least 88%, at least 89%, at least 90%, at least 91%, at least 92%, at least 93%, at least 94%, at least 95%, at least 96%, at least 97%, at least 98%, or at least 99% sequence identity to SEQ ID NO: 6. In some embodiments, the polypeptide having protease activity comprises an amino acid sequence having at least 50%, at least 60%, at least 70%, at least 80%, at least 81%, at least 82%, at least 83%, at least 84%, at least 85%, at least 86%, at least 87%, at least 88%, at least 89%, at least 90%, at least 91%, at least 92%, at least 93%, at least 94%, at least 95%, at least 96%, at least 97%, at least 98%, or at least 99% sequence identity to SEQ ID NO: 7. In some embodiments, the polypeptide having protease activity comprises an amino acid sequence having at least 50%, at least 60%, at least 70%, at least 80%, at least 81%, at least 82%, at least 83%, at least 84%, at least 85%, at least 86%, at least 87%, at least 88%, at least 89%, at least 90%, at least 91%, at least 92%, at least 93%, at least 94%, at least 95%, at least 96%, at least 97%, at least 98%, or at least 99% sequence identity to SEQ ID NO: 8. In some embodiments, the polypeptide having protease activity comprises an amino acid sequence having at least 50%, at least 60%, at least 70%, at least 80%, at least 81%, at least 82%, at least 83%, at least 84%, at least 85%, at least 86%, at least 87%, at least 88%, at least 89%, at least 90%, at least 91%, at least 92%, at least 93%, at least 94%, at least 95%, at least 96%, at least 97%, at least 98%, or at least 99% sequence identity to SEQ ID NO: 9. In some embodiments, the polypeptide having protease activity comprises an amino acid sequence having at least 50%, at least 60%, at least 70%, at least 80%, at least 81%, at least 82%, at least 83%, at least 84%, at least 85%, at least 86%, at least 87%, at least 88%, at least 89%, at least 90%, at least 91%, at least 92%, at least 93%, at least 94%, at least 95%, at least 96%, at least 97%, at least 98%, or at least 99% sequence identity to SEQ ID NO: 10. In some embodiments, the polypeptide having protease activity comprises an amino acid sequence having at least 50%, at least 60%, at least 70%, at least 80%, at least 81%, at least 82%, at least 83%, at least 84%, at least 85%, at least 86%, at least 87%, at least 88%, at least 89%, at least 90%, at least 91%, at least 92%, at least 93%, at least 94%, at least 95%, at least 96%, at least 97%, at least 98%, or at least 99% sequence identity to SEQ ID NO: 11. In some embodiments, the polypeptide having protease activity comprises an amino acid sequence having at least 50%, at least 60%, at least 70%, at least 80%, at least 81%, at least 82%, at least 83%, at least 84%, at least 85%, at least 86%, at least 87%, at least 88%, at least 89%, at least 90%, at least 91%, at least 92%, at least 93%, at least 94%, at least 95%, at least 96%, at least 97%, at least 98%, or at least 99% sequence identity to SEQ ID NO: 12. In some embodiments, the polypeptide having protease activity comprises an amino acid sequence having at least 50%, at least 60%, at least 70%, at least 80%, at least 81%, at least 82%, at least 83%, at least 84%, at least 85%, at least 86%, at least 87%, at least 88%, at least 89%, at least 90%, at least 91%, at least 92%, at least 93%, at least 94%, at least 95%, at least 96%, at least 97%, at least 98%, or at least 99% sequence identity to SEQ ID NO: 13. In some embodiments, the polypeptide having protease activity comprises an amino acid sequence having at least 50%, at least 60%, at least 70%, at least 80%, at least 81%, at least 82%, at least 83%, at least 84%, at least 85%, at least 86%, at least 87%, at least 88%, at least 89%, at least 90%, at least 91%, at least 92%, at least 93%, at least 94%, at least 95%, at least 96%, at least 97%, at least 98%, or at least 99% sequence identity to SEQ ID NO: 14. In some embodiments, the polypeptide having protease activity comprises an amino acid sequence having at least 50%, at least 60%, at least 70%, at least 80%, at least 81%, at least 82%, at least 83%, at least 84%, at least 85%, at least 86%, at least 87%, at least 88%, at least 89%, at least 90%, at least 91%, at least 92%, at least 93%, at least 94%, at least 95%, at least 96%, at least 97%, at least 98%, or at least 99% sequence identity to SEQ ID NO: 15. In some embodiments, the polypeptide having protease activity comprises an amino acid sequence having at least 50%, at least 60%, at least 70%, at least 80%, at least 81%, at least 82%, at least 83%, at least 84%, at least 85%, at least 86%, at least 87%, at least 88%, at least 89%, at least 90%, at least 91%, at least 92%, at least 93%, at least 94%, at least 95%, at least 96%, at least 97%, at least 98%, or at least 99% sequence identity to SEQ ID NO: 16. In some embodiments, the polypeptide having protease activity comprises an amino acid sequence having at least 50%, at least 60%, at least 70%, at least 80%, at least 81%, at least 82%, at least 83%, at least 84%, at least 85%, at least 86%, at least 87%, at least 88%, at least 89%, at least 90%, at least 91%, at least 92%, at least 93%, at least 94%, at least 95%, at least 96%, at least 97%, at least 98%, or at least 99% sequence identity to SEQ ID NO: 17. In some embodiments, the polypeptide having protease activity comprises an amino acid sequence having at least 50%, at least 60%, at least 70%, at least 80%, at least 81%, at least 82%, at least 83%, at least 84%, at least 85%, at least 86%, at least 87%, at least 88%, at least 89%, at least 90%, at least 91%, at least 92%, at least 93%, at least 94%, at least 95%, at least 96%, at least 97%, at least 98%, or at least 99% sequence identity to SEQ ID NO: 18. In some embodiments, the polypeptide having protease activity comprises an amino acid sequence having at least 50%, at least 60%, at least 70%, at least 80%, at least 81%, at least 82%, at least 83%, at least 84%, at least 85%, at least 86%, at least 87%, at least 88%, at least 89%, at least 90%, at least 91%, at least 92%, at least 93%, at least 94%, at least 95%, at least 96%, at least 97%, at least 98%, or at least 99% sequence identity to SEQ ID NO: 19. In some embodiments, the polypeptide having protease activity comprises an amino acid sequence having at least 50%, at least 60%, at least 70%, at least 80%, at least 81%, at least 82%, at least 83%, at least 84%, at least 85%, at least 86%, at least 87%, at least 88%, at least 89%, at least 90%, at least 91%, at least 92%, at least 93%, at least 94%, at least 95%, at least 96%, at least 97%, at least 98%, or at least 99% sequence identity to SEQ ID NO: 20. In some embodiments, the polypeptide having protease activity comprises an amino acid sequence having at least 50%, at least 60%, at least 70%, at least 80%, at least 81%, at least 82%, at least 83%, at least 84%, at least 85%, at least 86%, at least 87%, at least 88%, at least 89%, at least 90%, at least 91%, at least 92%, at least 93%, at least 94%, at least 95%, at least 96%, at least 97%, at least 98%, or at least 99% sequence identity to SEQ ID NO: 21. In some embodiments, the polypeptide having protease activity comprises an amino acid sequence having at least 50%, at least 60%, at least 70%, at least 80%, at least 81%, at least 82%, at least 83%, at least 84%, at least 85%, at least 86%, at least 87%, at least 88%, at least 89%, at least 90%, at least 91%, at least 92%, at least 93%, at least 94%, at least 95%, at least 96%, at least 97%, at least 98%, or at least 99% sequence identity to SEQ ID NO: 22. In some embodiments, the polypeptide having protease activity comprises an amino acid sequence having at least 50%, at least 60%, at least 70%, at least 80%, at least 81%, at least 82%, at least 83%, at least 84%, at least 85%, at least 86%, at least 87%, at least 88%, at least 89%, at least 90%, at least 91%, at least 92%, at least 93%, at least 94%, at least 95%, at least 96%, at least 97%, at least 98%, or at least 99% sequence identity to SEQ ID NO: 23. In some embodiments, the polypeptide having protease activity comprises an amino acid sequence having at least 50%, at least 60%, at least 70%, at least 80%, at least 81%, at least 82%, at least 83%, at least 84%, at least 85%, at least 86%, at least 87%, at least 88%, at least 89%, at least 90%, at least 91%, at least 92%, at least 93%, at least 94%, at least 95%, at least 96%, at least 97%, at least 98%, or at least 99% sequence identity to SEQ ID NO: 24. In some embodiments, the polypeptide having protease activity comprises an amino acid sequence having at least 50%, at least 60%, at least 70%, at least 80%, at least 81%, at least 82%, at least 83%, at least 84%, at least 85%, at least 86%, at least 87%, at least 88%, at least 89%, at least 90%, at least 91%, at least 92%, at least 93%, at least 94%, at least 95%, at least 96%, at least 97%, at least 98%, or at least 99% sequence identity to SEQ ID NO: 25. In some embodiments, the polypeptide having protease activity comprises an amino acid sequence having at least 50%, at least 60%, at least 70%, at least 80%, at least 81%, at least 82%, at least 83%, at least 84%, at least 85%, at least 86%, at least 87%, at least 88%, at least 89%, at least 90%, at least 91%, at least 92%, at least 93%, at least 94%, at least 95%, at least 96%, at least 97%, at least 98%, or at least 99% sequence identity to SEQ ID NO: 26. In some embodiments, the polypeptide having protease activity comprises an amino acid sequence having at least 50%, at least 60%, at least 70%, at least 80%, at least 81%, at least 82%, at least 83%, at least 84%, at least 85%, at least 86%, at least 87%, at least 88%, at least 89%, at least 90%, at least 91%, at least 92%, at least 93%, at least 94%, at least 95%, at least 96%, at least 97%, at least 98%, or at least 99% sequence identity to SEQ ID NO: 27. In some embodiments, the polypeptide having protease activity comprises an amino acid sequence having at least 50%, at least 60%, at least 70%, at least 80%, at least 81%, at least 82%, at least 83%, at least 84%, at least 85%, at least 86%, at least 87%, at least 88%, at least 89%, at least 90%, at least 91%, at least 92%, at least 93%, at least 94%, at least 95%, at least 96%, at least 97%, at least 98%, or at least 99% sequence identity to SEQ ID NO: 28. In some embodiments, the polypeptide having protease activity comprises an amino acid sequence having at least 50%, at least 60%, at least 70%, at least 80%, at least 81%, at least 82%, at least 83%, at least 84%, at least 85%, at least 86%, at least 87%, at least 88%, at least 89%, at least 90%, at least 91%, at least 92%, at least 93%, at least 94%, at least 95%, at least 96%, at least 97%, at least 98%, or at least 99% sequence identity to SEQ ID NO: 29. In some embodiments, the polypeptide having protease activity comprises an amino acid sequence having at least 50%, at least 60%, at least 70%, at least 80%, at least 81%, at least 82%, at least 83%, at least 84%, at least 85%, at least 86%, at least 87%, at least 88%, at least 89%, at least 90%, at least 91%, at least 92%, at least 93%, at least 94%, at least 95%, at least 96%, at least 97%, at least 98%, or at least 99% sequence identity to SEQ ID NO: 30. In some embodiments, the polypeptide having protease activity comprises an amino acid sequence having at least 50%, at least 60%, at least 70%, at least 80%, at least 81%, at least 82%, at least 83%, at least 84%, at least 85%, at least 86%, at least 87%, at least 88%, at least 89%, at least 90%, at least 91%, at least 92%, at least 93%, at least 94%, at least 95%, at least 96%, at least 97%, at least 98%, or at least 99% sequence identity to SEQ ID NO: 31. In some embodiments, the polypeptide having protease activity comprises an amino acid sequence having at least 50%, at least 60%, at least 70%, at least 80%, at least 81%, at least 82%, at least 83%, at least 84%, at least 85%, at least 86%, at least 87%, at least 88%, at least 89%, at least 90%, at least 91%, at least 92%, at least 93%, at least 94%, at least 95%, at least 96%, at least 97%, at least 98%, or at least 99% sequence identity to SEQ ID NO: 32. In some embodiments, the polypeptide having protease activity comprises an amino acid sequence having at least 50%, at least 60%, at least 70%, at least 80%, at least 81%, at least 82%, at least 83%, at least 84%, at least 85%, at least 86%, at least 87%, at least 88%, at least 89%, at least 90%, at least 91%, at least 92%, at least 93%, at least 94%, at least 95%, at least 96%, at least 97%, at least 98%, or at least 99% sequence identity to SEQ ID NO: 33. In some embodiments, the polypeptide having protease activity comprises an amino acid sequence having at least 50%, at least 60%, at least 70%, at least 80%, at least 81%, at least 82%, at least 83%, at least 84%, at least 85%, at least 86%, at least 87%, at least 88%, at least 89%, at least 90%, at least 91%, at least 92%, at least 93%, at least 94%, at least 95%, at least 96%, at least 97%, at least 98%, or at least 99% sequence identity to SEQ ID NO: 34. In some embodiments, the polypeptide having protease activity comprises an amino acid sequence having at least 50%, at least 60%, at least 70%, at least 80%, at least 81%, at least 82%, at least 83%, at least 84%, at least 85%, at least 86%, at least 87%, at least 88%, at least 89%, at least 90%, at least 91%, at least 92%, at least 93%, at least 94%, at least 95%, at least 96%, at least 97%, at least 98%, or at least 99% sequence identity to SEQ ID NO: 35. In some embodiments, the polypeptide having protease activity comprises an amino acid sequence having at least 50%, at least 60%, at least 70%, at least 80%, at least 81%, at least 82%, at least 83%, at least 84%, at least 85%, at least 86%, at least 87%, at least 88%, at least 89%, at least 90%, at least 91%, at least 92%, at least 93%, at least 94%, at least 95%, at least 96%, at least 97%, at least 98%, or at least 99% sequence identity to SEQ ID NO: 36. In some embodiments, the polypeptide having protease activity comprises an amino acid sequence having at least 50%, at least 60%, at least 70%, at least 80%, at least 81%, at least 82%, at least 83%, at least 84%, at least 85%, at least 86%, at least 87%, at least 88%, at least 89%, at least 90%, at least 91%, at least 92%, at least 93%, at least 94%, at least 95%, at least 96%, at least 97%, at least 98%, or at least 99% sequence identity to SEQ ID NO: 37. In some embodiments, the polypeptide having protease activity comprises an amino acid sequence having at least 50%, at least 60%, at least 70%, at least 80%, at least 81%, at least 82%, at least 83%, at least 84%, at least 85%, at least 86%, at least 87%, at least 88%, at least 89%, at least 90%, at least 91%, at least 92%, at least 93%, at least 94%, at least 95%, at least 96%, at least 97%, at least 98%, or at least 99% sequence identity to SEQ ID NO: 38. In some embodiments, the polypeptide having protease activity comprises an amino acid sequence having at least 50%, at least 60%, at least 70%, at least 80%, at least 81%, at least 82%, at least 83%, at least 84%, at least 85%, at least 86%, at least 87%, at least 88%, at least 89%, at least 90%, at least 91%, at least 92%, at least 93%, at least 94%, at least 95%, at least 96%, at least 97%, at least 98%, or at least 99% sequence identity to SEQ ID NO: 39. In some embodiments, the polypeptide having protease activity comprises an amino acid sequence having at least 50%, at least 60%, at least 70%, at least 80%, at least 81%, at least 82%, at least 83%, at least 84%, at least 85%, at least 86%, at least 87%, at least 88%, at least 89%, at least 90%, at least 91%, at least 92%, at least 93%, at least 94%, at least 95%, at least 96%, at least 97%, at least 98%, or at least 99% sequence identity to SEQ ID NO: 40. In some embodiments, the polypeptide having protease activity comprises an amino acid sequence having at least 50%, at least 60%, at least 70%, at least 80%, at least 81%, at least 82%, at least 83%, at least 84%, at least 85%, at least 86%, at least 87%, at least 88%, at least 89%, at least 90%, at least 91%, at least 92%, at least 93%, at least 94%, at least 95%, at least 96%, at least 97%, at least 98%, or at least 99% sequence identity to SEQ ID NO: 41. In some embodiments, the polypeptide having protease activity comprises an amino acid sequence having at least 50%, at least 60%, at least 70%, at least 80%, at least 81%, at least 82%, at least 83%, at least 84%, at least 85%, at least 86%, at least 87%, at least 88%, at least 89%, at least 90%, at least 91%, at least 92%, at least 93%, at least 94%, at least 95%, at least 96%, at least 97%, at least 98%, or at least 99% sequence identity to SEQ ID NO: 42. In some embodiments, the polypeptide having protease activity comprises an amino acid sequence having at least 50%, at least 60%, at least 70%, at least 80%, at least 81%, at least 82%, at least 83%, at least 84%, at least 85%, at least 86%, at least 87%, at least 88%, at least 89%, at least 90%, at least 91%, at least 92%, at least 93%, at least 94%, at least 95%, at least 96%, at least 97%, at least 98%, or at least 99% sequence identity to SEQ ID NO: 43. In some embodiments, the polypeptide having protease activity comprises an amino acid sequence having at least 50%, at least 60%, at least 70%, at least 80%, at least 81%, at least 82%, at least 83%, at least 84%, at least 85%, at least 86%, at least 87%, at least 88%, at least 89%, at least 90%, at least 91%, at least 92%, at least 93%, at least 94%, at least 95%, at least 96%, at least 97%, at least 98%, or at least 99% sequence identity to SEQ ID NO: 44. In some embodiments, the polypeptide having protease activity comprises an amino acid sequence having at least 50%, at least 60%, at least 70%, at least 80%, at least 81%, at least 82%, at least 83%, at least 84%, at least 85%, at least 86%, at least 87%, at least 88%, at least 89%, at least 90%, at least 91%, at least 92%, at least 93%, at least 94%, at least 95%, at least 96%, at least 97%, at least 98%, or at least 99% sequence identity to SEQ ID NO: 45. In some embodiments, the polypeptide having protease activity comprises an amino acid sequence having at least 50%, at least 60%, at least 70%, at least 80%, at least 81%, at least 82%, at least 83%, at least 84%, at least 85%, at least 86%, at least 87%, at least 88%, at least 89%, at least 90%, at least 91%, at least 92%, at least 93%, at least 94%, at least 95%, at least 96%, at least 97%, at least 98%, or at least 99% sequence identity to SEQ ID NO: 46. In some embodiments, the polypeptide having protease activity comprises an amino acid sequence having at least 50%, at least 60%, at least 70%, at least 80%, at least 81%, at least 82%, at least 83%, at least 84%, at least 85%, at least 86%, at least 87%, at least 88%, at least 89%, at least 90%, at least 91%, at least 92%, at least 93%, at least 94%, at least 95%, at least 96%, at least 97%, at least 98%, or at least 99% sequence identity to SEQ ID NO: 47. In some embodiments, the polypeptide having protease activity comprises an amino acid sequence having at least 50%, at least 60%, at least 70%, at least 80%, at least 81%, at least 82%, at least 83%, at least 84%, at least 85%, at least 86%, at least 87%, at least 88%, at least 89%, at least 90%, at least 91%, at least 92%, at least 93%, at least 94%, at least 95%, at least 96%, at least 97%, at least 98%, or at least 99% sequence identity to SEQ ID NO: 48. In some embodiments, the polypeptide having protease activity comprises an amino acid sequence having at least 50%, at least 60%, at least 70%, at least 80%, at least 81%, at least 82%, at least 83%, at least 84%, at least 85%, at least 86%, at least 87%, at least 88%, at least 89%, at least 90%, at least 91%, at least 92%, at least 93%, at least 94%, at least 95%, at least 96%, at least 97%, at least 98%, or at least 99% sequence identity to SEQ ID NO: 49. In some embodiments, the polypeptide having protease activity comprises an amino acid sequence having at least 50%, at least 60%, at least 70%, at least 80%, at least 81%, at least 82%, at least 83%, at least 84%, at least 85%, at least 86%, at least 87%, at least 88%, at least 89%, at least 90%, at least 91%, at least 92%, at least 93%, at least 94%, at least 95%, at least 96%, at least 97%, at least 98%, or at least 99% sequence identity to SEQ ID NO: 50. In some embodiments, the polypeptide having protease activity comprises an amino acid sequence having at least 50%, at least 60%, at least 70%, at least 80%, at least 81%, at least 82%, at least 83%, at least 84%, at least 85%, at least 86%, at least 87%, at least 88%, at least 89%, at least 90%, at least 91%, at least 92%, at least 93%, at least 94%, at least 95%, at least 96%, at least 97%, at least 98%, or at least 99% sequence identity to SEQ ID NO: 51. In some embodiments, the polypeptide having protease activity comprises an amino acid sequence having at least 50%, at least 60%, at least 70%, at least 80%, at least 81%, at least 82%, at least 83%, at least 84%, at least 85%, at least 86%, at least 87%, at least 88%, at least 89%, at least 90%, at least 91%, at least 92%, at least 93%, at least 94%, at least 95%, at least 96%, at least 97%, at least 98%, or at least 99% sequence identity to SEQ ID NO: 52. In some embodiments, the polypeptide having protease activity comprises an amino acid sequence having at least 50%, at least 60%, at least 70%, at least 80%, at least 81%, at least 82%, at least 83%, at least 84%, at least 85%, at least 86%, at least 87%, at least 88%, at least 89%, at least 90%, at least 91%, at least 92%, at least 93%, at least 94%, at least 95%, at least 96%, at least 97%, at least 98%, or at least 99% sequence identity to SEQ ID NO: 53. In some embodiments, the polypeptide having protease activity comprises an amino acid sequence having at least 50%, at least 60%, at least 70%, at least 80%, at least 81%, at least 82%, at least 83%, at least 84%, at least 85%, at least 86%, at least 87%, at least 88%, at least 89%, at least 90%, at least 91%, at least 92%, at least 93%, at least 94%, at least 95%, at least 96%, at least 97%, at least 98%, or at least 99% sequence identity to SEQ ID NO: 54. In some embodiments, the polypeptide having protease activity comprises an amino acid sequence having at least 50%, at least 60%, at least 70%, at least 80%, at least 81%, at least 82%, at least 83%, at least 84%, at least 85%, at least 86%, at least 87%, at least 88%, at least 89%, at least 90%, at least 91%, at least 92%, at least 93%, at least 94%, at least 95%, at least 96%, at least 97%, at least 98%, or at least 99% sequence identity to SEQ ID NO: 55. In some embodiments, the polypeptide having protease activity comprises an amino acid sequence having at least 50%, at least 60%, at least 70%, at least 80%, at least 81%, at least 82%, at least 83%, at least 84%, at least 85%, at least 86%, at least 87%, at least 88%, at least 89%, at least 90%, at least 91%, at least 92%, at least 93%, at least 94%, at least 95%, at least 96%, at least 97%, at least 98%, or at least 99% sequence identity to SEQ ID NO: 56. In some embodiments, the polypeptide having protease activity comprises an amino acid sequence having at least 50%, at least 60%, at least 70%, at least 80%, at least 81%, at least 82%, at least 83%, at least 84%, at least 85%, at least 86%, at least 87%, at least 88%, at least 89%, at least 90%, at least 91%, at least 92%, at least 93%, at least 94%, at least 95%, at least 96%, at least 97%, at least 98%, or at least 99% sequence identity to SEQ ID NO: 57. In some embodiments, the polypeptide having protease activity comprises an amino acid sequence having at least 50%, at least 60%, at least 70%, at least 80%, at least 81%, at least 82%, at least 83%, at least 84%, at least 85%, at least 86%, at least 87%, at least 88%, at least 89%, at least 90%, at least 91%, at least 92%, at least 93%, at least 94%, at least 95%, at least 96%, at least 97%, at least 98%, or at least 99% sequence identity to SEQ ID NO: 58. In some embodiments, the polypeptide having protease activity comprises an amino acid sequence having at least 50%, at least 60%, at least 70%, at least 80%, at least 81%, at least 82%, at least 83%, at least 84%, at least 85%, at least 86%, at least 87%, at least 88%, at least 89%, at least 90%, at least 91%, at least 92%, at least 93%, at least 94%, at least 95%, at least 96%, at least 97%, at least 98%, or at least 99% sequence identity to SEQ ID NO: 59. In some embodiments, the polypeptide having protease activity comprises an amino acid sequence having at least 50%, at least 60%, at least 70%, at least 80%, at least 81%, at least 82%, at least 83%, at least 84%, at least 85%, at least 86%, at least 87%, at least 88%, at least 89%, at least 90%, at least 91%, at least 92%, at least 93%, at least 94%, at least 95%, at least 96%, at least 97%, at least 98%, or at least 99% sequence identity to SEQ ID NO: 60. In some embodiments, the polypeptide having protease activity comprises an amino acid sequence having at least 50%, at least 60%, at least 70%, at least 80%, at least 81%, at least 82%, at least 83%, at least 84%, at least 85%, at least 86%, at least 87%, at least 88%, at least 89%, at least 90%, at least 91%, at least 92%, at least 93%, at least 94%, at least 95%, at least 96%, at least 97%, at least 98%, or at least 99% sequence identity to SEQ ID NO: 61. In some embodiments, the polypeptide having protease activity comprises an amino acid sequence having at least 50%, at least 60%, at least 70%, at least 80%, at least 81%, at least 82%, at least 83%, at least 84%, at least 85%, at least 86%, at least 87%, at least 88%, at least 89%, at least 90%, at least 91%, at least 92%, at least 93%, at least 94%, at least 95%, at least 96%, at least 97%, at least 98%, or at least 99% sequence identity to SEQ ID NO: 62. In some embodiments, the polypeptide having protease activity comprises an amino acid sequence having at least 50%, at least 60%, at least 70%, at least 80%, at least 81%, at least 82%, at least 83%, at least 84%, at least 85%, at least 86%, at least 87%, at least 88%, at least 89%, at least 90%, at least 91%, at least 92%, at least 93%, at least 94%, at least 95%, at least 96%, at least 97%, at least 98%, or at least 99% sequence identity to SEQ ID NO: 63. In some embodiments, the polypeptide having protease activity comprises an amino acid sequence having at least 50%, at least 60%, at least 70%, at least 80%, at least 81%, at least 82%, at least 83%, at least 84%, at least 85%, at least 86%, at least 87%, at least 88%, at least 89%, at least 90%, at least 91%, at least 92%, at least 93%, at least 94%, at least 95%, at least 96%, at least 97%, at least 98%, or at least 99% sequence identity to SEQ ID NO: 64. In some embodiments, the polypeptide having protease activity comprises an amino acid sequence having at least 50%, at least 60%, at least 70%, at least 80%, at least 81%, at least 82%, at least 83%, at least 84%, at least 85%, at least 86%, at least 87%, at least 88%, at least 89%, at least 90%, at least 91%, at least 92%, at least 93%, at least 94%, at least 95%, at least 96%, at least 97%, at least 98%, or at least 99% sequence identity to SEQ ID NO: 65. In some embodiments, the polypeptide having protease activity comprises an amino acid sequence having at least 50%, at least 60%, at least 70%, at least 80%, at least 81%, at least 82%, at least 83%, at least 84%, at least 85%, at least 86%, at least 87%, at least 88%, at least 89%, at least 90%, at least 91%, at least 92%, at least 93%, at least 94%, at least 95%, at least 96%, at least 97%, at least 98%, or at least 99% sequence identity to SEQ ID NO: 66. In some embodiments, the polypeptide having protease activity comprises an amino acid sequence having at least 50%, at least 60%, at least 70%, at least 80%, at least 81%, at least 82%, at least 83%, at least 84%, at least 85%, at least 86%, at least 87%, at least 88%, at least 89%, at least 90%, at least 91%, at least 92%, at least 93%, at least 94%, at least 95%, at least 96%, at least 97%, at least 98%, or at least 99% sequence identity to SEQ ID NO: 67. In some embodiments, the polypeptide having protease activity comprises an amino acid sequence having at least 50%, at least 60%, at least 70%, at least 80%, at least 81%, at least 82%, at least 83%, at least 84%, at least 85%, at least 86%, at least 87%, at least 88%, at least 89%, at least 90%, at least 91%, at least 92%, at least 93%, at least 94%, at least 95%, at least 96%, at least 97%, at least 98%, or at least 99% sequence identity to SEQ ID NO: 68. In some embodiments, the polypeptide having protease activity comprises an amino acid sequence having at least 50%, at least 60%, at least 70%, at least 80%, at least 81%, at least 82%, at least 83%, at least 84%, at least 85%, at least 86%, at least 87%, at least 88%, at least 89%, at least 90%, at least 91%, at least 92%, at least 93%, at least 94%, at least 95%, at least 96%, at least 97%, at least 98%, or at least 99% sequence identity to SEQ ID NO: 69. In some embodiments, the polypeptide having protease activity comprises an amino acid sequence having at least 50%, at least 60%, at least 70%, at least 80%, at least 81%, at least 82%, at least 83%, at least 84%, at least 85%, at least 86%, at least 87%, at least 88%, at least 89%, at least 90%, at least 91%, at least 92%, at least 93%, at least 94%, at least 95%, at least 96%, at least 97%, at least 98%, or at least 99% sequence identity to SEQ ID NO: 70. In some embodiments, the polypeptide having protease activity comprises an amino acid sequence having at least 50%, at least 60%, at least 70%, at least 80%, at least 81%, at least 82%, at least 83%, at least 84%, at least 85%, at least 86%, at least 87%, at least 88%, at least 89%, at least 90%, at least 91%, at least 92%, at least 93%, at least 94%, at least 95%, at least 96%, at least 97%, at least 98%, or at least 99% sequence identity to SEQ ID NO: 71. In some embodiments, the polypeptide having protease activity comprises an amino acid sequence having at least 50%, at least 60%, at least 70%, at least 80%, at least 81%, at least 82%, at least 83%, at least 84%, at least 85%, at least 86%, at least 87%, at least 88%, at least 89%, at least 90%, at least 91%, at least 92%, at least 93%, at least 94%, at least 95%, at least 96%, at least 97%, at least 98%, or at least 99% sequence identity to SEQ ID NO: 72. In some embodiments, the polypeptide having protease activity comprises an amino acid sequence having at least 50%, at least 60%, at least 70%, at least 80%, at least 81%, at least 82%, at least 83%, at least 84%, at least 85%, at least 86%, at least 87%, at least 88%, at least 89%, at least 90%, at least 91%, at least 92%, at least 93%, at least 94%, at least 95%, at least 96%, at least 97%, at least 98%, or at least 99% sequence identity to SEQ ID NO: 73. In some embodiments, the polypeptide having protease activity comprises an amino acid sequence having at least 50%, at least 60%, at least 70%, at least 80%, at least 81%, at least 82%, at least 83%, at least 84%, at least 85%, at least 86%, at least 87%, at least 88%, at least 89%, at least 90%, at least 91%, at least 92%, at least 93%, at least 94%, at least 95%, at least 96%, at least 97%, at least 98%, or at least 99% sequence identity to SEQ ID NO: 74. In some embodiments, the polypeptide having protease activity comprises an amino acid sequence having at least 50%, at least 60%, at least 70%, at least 80%, at least 81%, at least 82%, at least 83%, at least 84%, at least 85%, at least 86%, at least 87%, at least 88%, at least 89%, at least 90%, at least 91%, at least 92%, at least 93%, at least 94%, at least 95%, at least 96%, at least 97%, at least 98%, or at least 99% sequence identity to SEQ ID NO: 75. In some embodiments, the polypeptide having protease activity comprises an amino acid sequence having at least 50%, at least 60%, at least 70%, at least 80%, at least 81%, at least 82%, at least 83%, at least 84%, at least 85%, at least 86%, at least 87%, at least 88%, at least 89%, at least 90%, at least 91%, at least 92%, at least 93%, at least 94%, at least 95%, at least 96%, at least 97%, at least 98%, or at least 99% sequence identity to SEQ ID NO: 76. In some embodiments, the polypeptide having protease activity comprises an amino acid sequence having at least 50%, at least 60%, at least 70%, at least 80%, at least 81%, at least 82%, at least 83%, at least 84%, at least 85%, at least 86%, at least 87%, at least 88%, at least 89%, at least 90%, at least 91%, at least 92%, at least 93%, at least 94%, at least 95%, at least 96%, at least 97%, at least 98%, or at least 99% sequence identity to SEQ ID NO: 77. In some embodiments, the polypeptide having protease activity comprises an amino acid sequence having at least 50%, at least 60%, at least 70%, at least 80%, at least 81%, at least 82%, at least 83%, at least 84%, at least 85%, at least 86%, at least 87%, at least 88%, at least 89%, at least 90%, at least 91%, at least 92%, at least 93%, at least 94%, at least 95%, at least 96%, at least 97%, at least 98%, or at least 99% sequence identity to SEQ ID NO: 78. In some embodiments, the polypeptide having protease activity comprises an amino acid sequence having at least 50%, at least 60%, at least 70%, at least 80%, at least 81%, at least 82%, at least 83%, at least 84%, at least 85%, at least 86%, at least 87%, at least 88%, at least 89%, at least 90%, at least 91%, at least 92%, at least 93%, at least 94%, at least 95%, at least 96%, at least 97%, at least 98%, or at least 99% sequence identity to SEQ ID NO: 79. In some embodiments, the polypeptide having protease activity comprises an amino acid sequence having at least 50%, at least 60%, at least 70%, at least 80%, at least 81%, at least 82%, at least 83%, at least 84%, at least 85%, at least 86%, at least 87%, at least 88%, at least 89%, at least 90%, at least 91%, at least 92%, at least 93%, at least 94%, at least 95%, at least 96%, at least 97%, at least 98%, or at least 99% sequence identity to SEQ ID NO: 80. In some embodiments, the polypeptide having protease activity comprises an amino acid sequence having at least 50%, at least 60%, at least 70%, at least 80%, at least 81%, at least 82%, at least 83%, at least 84%, at least 85%, at least 86%, at least 87%, at least 88%, at least 89%, at least 90%, at least 91%, at least 92%, at least 93%, at least 94%, at least 95%, at least 96%, at least 97%, at least 98%, or at least 99% sequence identity to SEQ ID NO: 81. In some embodiments, the polypeptide having protease activity comprises an amino acid sequence having at least 50%, at least 60%, at least 70%, at least 80%, at least 81%, at least 82%, at least 83%, at least 84%, at least 85%, at least 86%, at least 87%, at least 88%, at least 89%, at least 90%, at least 91%, at least 92%, at least 93%, at least 94%, at least 95%, at least 96%, at least 97%, at least 98%, or at least 99% sequence identity to SEQ ID NO: 82. In some embodiments, the polypeptide having protease activity comprises an amino acid sequence having at least 50%, at least 60%, at least 70%, at least 80%, at least 81%, at least 82%, at least 83%, at least 84%, at least 85%, at least 86%, at least 87%, at least 88%, at least 89%, at least 90%, at least 91%, at least 92%, at least 93%, at least 94%, at least 95%, at least 96%, at least 97%, at least 98%, or at least 99% sequence identity to SEQ ID NO: 83. In some embodiments, the polypeptide having protease activity comprises an amino acid sequence having at least 50%, at least 60%, at least 70%, at least 80%, at least 81%, at least 82%, at least 83%, at least 84%, at least 85%, at least 86%, at least 87%, at least 88%, at least 89%, at least 90%, at least 91%, at least 92%, at least 93%, at least 94%, at least 95%, at least 96%, at least 97%, at least 98%, or at least 99% sequence identity to SEQ ID NO: 84. In some embodiments, the polypeptide having protease activity comprises an amino acid sequence having at least 50%, at least 60%, at least 70%, at least 80%, at least 81%, at least 82%, at least 83%, at least 84%, at least 85%, at least 86%, at least 87%, at least 88%, at least 89%, at least 90%, at least 91%, at least 92%, at least 93%, at least 94%, at least 95%, at least 96%, at least 97%, at least 98%, or at least 99% sequence identity to SEQ ID NO: 85. In some embodiments, the polypeptide having protease activity comprises an amino acid sequence having at least 50%, at least 60%, at least 70%, at least 80%, at least 81%, at least 82%, at least 83%, at least 84%, at least 85%, at least 86%, at least 87%, at least 88%, at least 89%, at least 90%, at least 91%, at least 92%, at least 93%, at least 94%, at least 95%, at least 96%, at least 97%, at least 98%, or at least 99% sequence identity to SEQ ID NO: 86. In some embodiments, the polypeptide having protease activity comprises an amino acid sequence having at least 50%, at least 60%, at least 70%, at least 80%, at least 81%, at least 82%, at least 83%, at least 84%, at least 85%, at least 86%, at least 87%, at least 88%, at least 89%, at least 90%, at least 91%, at least 92%, at least 93%, at least 94%, at least 95%, at least 96%, at least 97%, at least 98%, or at least 99% sequence identity to SEQ ID NO: 87. In some embodiments, the polypeptide having protease activity comprises an amino acid sequence having at least 50%, at least 60%, at least 70%, at least 80%, at least 81%, at least 82%, at least 83%, at least 84%, at least 85%, at least 86%, at least 87%, at least 88%, at least 89%, at least 90%, at least 91%, at least 92%, at least 93%, at least 94%, at least 95%, at least 96%, at least 97%, at least 98%, or at least 99% sequence identity to SEQ ID NO: 88. In some embodiments, the polypeptide having protease activity comprises an amino acid sequence having at least 50%, at least 60%, at least 70%, at least 80%, at least 81%, at least 82%, at least 83%, at least 84%, at least 85%, at least 86%, at least 87%, at least 88%, at least 89%, at least 90%, at least 91%, at least 92%, at least 93%, at least 94%, at least 95%, at least 96%, at least 97%, at least 98%, or at least 99% sequence identity to SEQ ID NO: 89. In some embodiments, the polypeptide having protease activity comprises an amino acid sequence having at least 50%, at least 60%, at least 70%, at least 80%, at least 81%, at least 82%, at least 83%, at least 84%, at least 85%, at least 86%, at least 87%, at least 88%, at least 89%, at least 90%, at least 91%, at least 92%, at least 93%, at least 94%, at least 95%, at least 96%, at least 97%, at least 98%, or at least 99% sequence identity to SEQ ID NO: 90. In some embodiments, the polypeptide having protease activity comprises an amino acid sequence having at least 50%, at least 60%, at least 70%, at least 80%, at least 81%, at least 82%, at least 83%, at least 84%, at least 85%, at least 86%, at least 87%, at least 88%, at least 89%, at least 90%, at least 91%, at least 92%, at least 93%, at least 94%, at least 95%, at least 96%, at least 97%, at least 98%, or at least 99% sequence identity to SEQ ID NO: 91. In some embodiments, the polypeptide having protease activity comprises an amino acid sequence having at least 50%, at least 60%, at least 70%, at least 80%, at least 81%, at least 82%, at least 83%, at least 84%, at least 85%, at least 86%, at least 87%, at least 88%, at least 89%, at least 90%, at least 91%, at least 92%, at least 93%, at least 94%, at least 95%, at least 96%, at least 97%, at least 98%, or at least 99% sequence identity to SEQ ID NO: 92. In some embodiments, the polypeptide having protease activity comprises an amino acid sequence having at least 50%, at least 60%, at least 70%, at least 80%, at least 81%, at least 82%, at least 83%, at least 84%, at least 85%, at least 86%, at least 87%, at least 88%, at least 89%, at least 90%, at least 91%, at least 92%, at least 93%, at least 94%, at least 95%, at least 96%, at least 97%, at least 98%, or at least 99% sequence identity to SEQ ID NO: 93. In some embodiments, the polypeptide having protease activity comprises an amino acid sequence having at least 50%, at least 60%, at least 70%, at least 80%, at least 81%, at least 82%, at least 83%, at least 84%, at least 85%, at least 86%, at least 87%, at least 88%, at least 89%, at least 90%, at least 91%, at least 92%, at least 93%, at least 94%, at least 95%, at least 96%, at least 97%, at least 98%, or at least 99% sequence identity to SEQ ID NO: 96. In some embodiments, the polypeptide having protease activity comprises an amino acid sequence having at least 50%, at least 60%, at least 70%, at least 80%, at least 81%, at least 82%, at least 83%, at least 84%, at least 85%, at least 86%, at least 87%, at least 88%, at least 89%, at least 90%, at least 91%, at least 92%, at least 93%, at least 94%, at least 95%, at least 96%, at least 97%, at least 98%, or at least 99% sequence identity to SEQ ID NO: 97. In some embodiments, the polypeptide having protease activity comprises an amino acid sequence having at least 50%, at least 60%, at least 70%, at least 80%, at least 81%, at least 82%, at least 83%, at least 84%, at least 85%, at least 86%, at least 87%, at least 88%, at least 89%, at least 90%, at least 91%, at least 92%, at least 93%, at least 94%, at least 95%, at least 96%, at least 97%, at least 98%, or at least 99% sequence identity to SEQ ID NO: 98. In some embodiments, the polypeptide having protease activity comprises an amino acid sequence having at least 50%, at least 60%, at least 70%, at least 80%, at least 81%, at least 82%, at least 83%, at least 84%, at least 85%, at least 86%, at least 87%, at least 88%, at least 89%, at least 90%, at least 91%, at least 92%, at least 93%, at least 94%, at least 95%, at least 96%, at least 97%, at least 98%, or at least 99% sequence identity to SEQ ID NO: 99. In some embodiments, the polypeptide having protease activity comprises an amino acid sequence having at least 50%, at least 60%, at least 70%, at least 80%, at least 81%, at least 82%, at least 83%, at least 84%, at least 85%, at least 86%, at least 87%, at least 88%, at least 89%, at least 90%, at least 91%, at least 92%, at least 93%, at least 94%, at least 95%, at least 96%, at least 97%, at least 98%, or at least 99% sequence identity to SEQ ID NO: 100. In some embodiments, the polypeptide having protease activity comprises an amino acid sequence having at least 50%, at least 60%, at least 70%, at least 80%, at least 81%, at least 82%, at least 83%, at least 84%, at least 85%, at least 86%, at least 87%, at least 88%, at least 89%, at least 90%, at least 91%, at least 92%, at least 93%, at least 94%, at least 95%, at least 96%, at least 97%, at least 98%, or at least 99% sequence identity to SEQ ID NO: 101. In some embodiments, the polypeptide having protease activity comprises an amino acid sequence having at least 50%, at least 60%, at least 70%, at least 80%, at least 81%, at least 82%, at least 83%, at least 84%, at least 85%, at least 86%, at least 87%, at least 88%, at least 89%, at least 90%, at least 91%, at least 92%, at least 93%, at least 94%, at least 95%, at least 96%, at least 97%, at least 98%, or at least 99% sequence identity to SEQ ID NO: 102. In some embodiments, the polypeptide having protease activity comprises an amino acid sequence having at least 50%, at least 60%, at least 70%, at least 80%, at least 81%, at least 82%, at least 83%, at least 84%, at least 85%, at least 86%, at least 87%, at least 88%, at least 89%, at least 90%, at least 91%, at least 92%, at least 93%, at least 94%, at least 95%, at least 96%, at least 97%, at least 98%, or at least 99% sequence identity to SEQ ID NO: 103. In some embodiments, the polypeptide having protease activity comprises an amino acid sequence having at least 50%, at least 60%, at least 70%, at least 80%, at least 81%, at least 82%, at least 83%, at least 84%, at least 85%, at least 86%, at least 87%, at least 88%, at least 89%, at least 90%, at least 91%, at least 92%, at least 93%, at least 94%, at least 95%, at least 96%, at least 97%, at least 98%, or at least 99% sequence identity to SEQ ID NO: 104. In some embodiments, the polypeptide having protease activity comprises an amino acid sequence having at least 50%, at least 60%, at least 70%, at least 80%, at least 81%, at least 82%, at least 83%, at least 84%, at least 85%, at least 86%, at least 87%, at least 88%, at least 89%, at least 90%, at least 91%, at least 92%, at least 93%, at least 94%, at least 95%, at least 96%, at least 97%, at least 98%, or at least 99% sequence identity to SEQ ID NO: 105. In some embodiments, the polypeptide having protease activity comprises an amino acid sequence having at least 50%, at least 60%, at least 70%, at least 80%, at least 81%, at least 82%, at least 83%, at least 84%, at least 85%, at least 86%, at least 87%, at least 88%, at least 89%, at least 90%, at least 91%, at least 92%, at least 93%, at least 94%, at least 95%, at least 96%, at least 97%, at least 98%, or at least 99% sequence identity to SEQ ID NO: 106. In some embodiments, the polypeptide having protease activity comprises an amino acid sequence having at least 50%, at least 60%, at least 70%, at least 80%, at least 81%, at least 82%, at least 83%, at least 84%, at least 85%, at least 86%, at least 87%, at least 88%, at least 89%, at least 90%, at least 91%, at least 92%, at least 93%, at least 94%, at least 95%, at least 96%, at least 97%, at least 98%, or at least 99% sequence identity to SEQ ID NO: 107. In some embodiments, the polypeptide having protease activity comprises an amino acid sequence having at least 50%, at least 60%, at least 70%, at least 80%, at least 81%, at least 82%, at least 83%, at least 84%, at least 85%, at least 86%, at least 87%, at least 88%, at least 89%, at least 90%, at least 91%, at least 92%, at least 93%, at least 94%, at least 95%, at least 96%, at least 97%, at least 98%, or at least 99% sequence identity to SEQ ID NO: 108. In some embodiments, the polypeptide having protease activity comprises an amino acid sequence having at least 50%, at least 60%, at least 70%, at least 80%, at least 81%, at least 82%, at least 83%, at least 84%, at least 85%, at least 86%, at least 87%, at least 88%, at least 89%, at least 90%, at least 91%, at least 92%, at least 93%, at least 94%, at least 95%, at least 96%, at least 97%, at least 98%, or at least 99% sequence identity to SEQ ID NO: 109. In some embodiments, the polypeptide having protease activity comprises an amino acid sequence having at least 50%, at least 60%, at least 70%, at least 80%, at least 81%, at least 82%, at least 83%, at least 84%, at least 85%, at least 86%, at least 87%, at least 88%, at least 89%, at least 90%, at least 91%, at least 92%, at least 93%, at least 94%, at least 95%, at least 96%, at least 97%, at least 98%, or at least 99% sequence identity to SEQ ID NO: 110. In some embodiments, the polypeptide having protease activity comprises an amino acid sequence having at least 50%, at least 60%, at least 70%, at least 80%, at least 81%, at least 82%, at least 83%, at least 84%, at least 85%, at least 86%, at least 87%, at least 88%, at least 89%, at least 90%, at least 91%, at least 92%, at least 93%, at least 94%, at least 95%, at least 96%, at least 97%, at least 98%, or at least 99% sequence identity to SEQ ID NO: 111. In some embodiments, the polypeptide having protease activity comprises an amino acid sequence having at least 50%, at least 60%, at least 70%, at least 80%, at least 81%, at least 82%, at least 83%, at least 84%, at least 85%, at least 86%, at least 87%, at least 88%, at least 89%, at least 90%, at least 91%, at least 92%, at least 93%, at least 94%, at least 95%, at least 96%, at least 97%, at least 98%, or at least 99% sequence identity to SEQ ID NO: 112. In some embodiments, the polypeptide having protease activity comprises an amino acid sequence having at least 50%, at least 60%, at least 70%, at least 80%, at least 81%, at least 82%, at least 83%, at least 84%, at least 85%, at least 86%, at least 87%, at least 88%, at least 89%, at least 90%, at least 91%, at least 92%, at least 93%, at least 94%, at least 95%, at least 96%, at least 97%, at least 98%, or at least 99% sequence identity to SEQ ID NO: 113. In some embodiments, the polypeptide having protease activity comprises an amino acid sequence having at least 50%, at least 60%, at least 70%, at least 80%, at least 81%, at least 82%, at least 83%, at least 84%, at least 85%, at least 86%, at least 87%, at least 88%, at least 89%, at least 90%, at least 91%, at least 92%, at least 93%, at least 94%, at least 95%, at least 96%, at least 97%, at least 98%, or at least 99% sequence identity to SEQ ID NO: 114. In some embodiments, the polypeptide having protease activity comprises an amino acid sequence having at least 50%, at least 60%, at least 70%, at least 80%, at least 81%, at least 82%, at least 83%, at least 84%, at least 85%, at least 86%, at least 87%, at least 88%, at least 89%, at least 90%, at least 91%, at least 92%, at least 93%, at least 94%, at least 95%, at least 96%, at least 97%, at least 98%, or at least 99% sequence identity to SEQ ID NO: 115. In some embodiments, the polypeptide having protease activity comprises an amino acid sequence having at least 50%, at least 60%, at least 70%, at least 80%, at least 81%, at least 82%, at least 83%, at least 84%, at least 85%, at least 86%, at least 87%, at least 88%, at least 89%, at least 90%, at least 91%, at least 92%, at least 93%, at least 94%, at least 95%, at least 96%, at least 97%, at least 98%, or at least 99% sequence identity to SEQ ID NO: 116. In some embodiments, the polypeptide having protease activity comprises an amino acid sequence having at least 50%, at least 60%, at least 70%, at least 80%, at least 81%, at least 82%, at least 83%, at least 84%, at least 85%, at least 86%, at least 87%, at least 88%, at least 89%, at least 90%, at least 91%, at least 92%, at least 93%, at least 94%, at least 95%, at least 96%, at least 97%, at least 98%, or at least 99% sequence identity to SEQ ID NO: 117. In some embodiments, the polypeptide having protease activity comprises an amino acid sequence having at least 50%, at least 60%, at least 70%, at least 80%, at least 81%, at least 82%, at least 83%, at least 84%, at least 85%, at least 86%, at least 87%, at least 88%, at least 89%, at least 90%, at least 91%, at least 92%, at least 93%, at least 94%, at least 95%, at least 96%, at least 97%, at least 98%, or at least 99% sequence identity to SEQ ID NO: 118. In some embodiments, the polypeptide having protease activity comprises an amino acid sequence having at least 50%, at least 60%, at least 70%, at least 80%, at least 81%, at least 82%, at least 83%, at least 84%, at least 85%, at least 86%, at least 87%, at least 88%, at least 89%, at least 90%, at least 91%, at least 92%, at least 93%, at least 94%, at least 95%, at least 96%, at least 97%, at least 98%, or at least 99% sequence identity to SEQ ID NO: 119. In some embodiments, the polypeptide having protease activity comprises an amino acid sequence having at least 50%, at least 60%, at least 70%, at least 80%, at least 81%, at least 82%, at least 83%, at least 84%, at least 85%, at least 86%, at least 87%, at least 88%, at least 89%, at least 90%, at least 91%, at least 92%, at least 93%, at least 94%, at least 95%, at least 96%, at least 97%, at least 98%, or at least 99% sequence identity to SEQ ID NO: 120. In some embodiments, the polypeptide having protease activity comprises an amino acid sequence having at least 50%, at least 60%, at least 70%, at least 80%, at least 81%, at least 82%, at least 83%, at least 84%, at least 85%, at least 86%, at least 87%, at least 88%, at least 89%, at least 90%, at least 91%, at least 92%, at least 93%, at least 94%, at least 95%, at least 96%, at least 97%, at least 98%, or at least 99% sequence identity to SEQ ID NO: 121. In some embodiments, the polypeptide having protease activity comprises an amino acid sequence having at least 50%, at least 60%, at least 70%, at least 80%, at least 81%, at least 82%, at least 83%, at least 84%, at least 85%, at least 86%, at least 87%, at least 88%, at least 89%, at least 90%, at least 91%, at least 92%, at least 93%, at least 94%, at least 95%, at least 96%, at least 97%, at least 98%, or at least 99% sequence identity to SEQ ID NO: 122. In some embodiments, the polypeptide having protease activity comprises an amino acid sequence having at least 50%, at least 60%, at least 70%, at least 80%, at least 81%, at least 82%, at least 83%, at least 84%, at least 85%, at least 86%, at least 87%, at least 88%, at least 89%, at least 90%, at least 91%, at least 92%, at least 93%, at least 94%, at least 95%, at least 96%, at least 97%, at least 98%, or at least 99% sequence identity to SEQ ID NO: 123. In some embodiments, the polypeptide having protease activity comprises an amino acid sequence having at least 50%, at least 60%, at least 70%, at least 80%, at least 81%, at least 82%, at least 83%, at least 84%, at least 85%, at least 86%, at least 87%, at least 88%, at least 89%, at least 90%, at least 91%, at least 92%, at least 93%, at least 94%, at least 95%, at least 96%, at least 97%, at least 98%, or at least 99% sequence identity to SEQ ID NO: 124. In some embodiments, the polypeptide having protease activity comprises an amino acid sequence having at least 50%, at least 60%, at least 70%, at least 80%, at least 81%, at least 82%, at least 83%, at least 84%, at least 85%, at least 86%, at least 87%, at least 88%, at least 89%, at least 90%, at least 91%, at least 92%, at least 93%, at least 94%, at least 95%, at least 96%, at least 97%, at least 98%, or at least 99% sequence identity to SEQ ID NO: 125. In some embodiments, the polypeptide having protease activity comprises an amino acid sequence having at least 50%, at least 60%, at least 70%, at least 80%, at least 81%, at least 82%, at least 83%, at least 84%, at least 85%, at least 86%, at least 87%, at least 88%, at least 89%, at least 90%, at least 91%, at least 92%, at least 93%, at least 94%, at least 95%, at least 96%, at least 97%, at least 98%, or at least 99% sequence identity to SEQ ID NO: 126. In some embodiments, the polypeptide having protease activity comprises an amino acid sequence having at least 50%, at least 60%, at least 70%, at least 80%, at least 81%, at least 82%, at least 83%, at least 84%, at least 85%, at least 86%, at least 87%, at least 88%, at least 89%, at least 90%, at least 91%, at least 92%, at least 93%, at least 94%, at least 95%, at least 96%, at least 97%, at least 98%, or at least 99% sequence identity to SEQ ID NO: 127. In some embodiments, the polypeptide having protease activity comprises an amino acid sequence having at least 50%, at least 60%, at least 70%, at least 80%, at least 81%, at least 82%, at least 83%, at least 84%, at least 85%, at least 86%, at least 87%, at least 88%, at least 89%, at least 90%, at least 91%, at least 92%, at least 93%, at least 94%, at least 95%, at least 96%, at least 97%, at least 98%, or at least 99% sequence identity to SEQ ID NO: 128. In some embodiments, the polypeptide having protease activity comprises an amino acid sequence having at least 50%, at least 60%, at least 70%, at least 80%, at least 81%, at least 82%, at least 83%, at least 84%, at least 85%, at least 86%, at least 87%, at least 88%, at least 89%, at least 90%, at least 91%, at least 92%, at least 93%, at least 94%, at least 95%, at least 96%, at least 97%, at least 98%, or at least 99% sequence identity to SEQ ID NO: 129. In some embodiments, the polypeptide having protease activity comprises an amino acid sequence having at least 50%, at least 60%, at least 70%, at least 80%, at least 81%, at least 82%, at least 83%, at least 84%, at least 85%, at least 86%, at least 87%, at least 88%, at least 89%, at least 90%, at least 91%, at least 92%, at least 93%, at least 94%, at least 95%, at least 96%, at least 97%, at least 98%, or at least 99% sequence identity to SEQ ID NO: 130. In some embodiments, the polypeptide having protease activity comprises an amino acid sequence having at least 50%, at least 60%, at least 70%, at least 80%, at least 81%, at least 82%, at least 83%, at least 84%, at least 85%, at least 86%, at least 87%, at least 88%, at least 89%, at least 90%, at least 91%, at least 92%, at least 93%, at least 94%, at least 95%, at least 96%, at least 97%, at least 98%, or at least 99% sequence identity to SEQ ID NO: 131. In some embodiments, the polypeptide having protease activity comprises an amino acid sequence having at least 50%, at least 60%, at least 70%, at least 80%, at least 81%, at least 82%, at least 83%, at least 84%, at least 85%, at least 86%, at least 87%, at least 88%, at least 89%, at least 90%, at least 91%, at least 92%, at least 93%, at least 94%, at least 95%, at least 96%, at least 97%, at least 98%, or at least 99% sequence identity to SEQ ID NO: 132. In some embodiments, the polypeptide having protease activity comprises an amino acid sequence having at least 50%, at least 60%, at least 70%, at least 80%, at least 81%, at least 82%, at least 83%, at least 84%, at least 85%, at least 86%, at least 87%, at least 88%, at least 89%, at least 90%, at least 91%, at least 92%, at least 93%, at least 94%, at least 95%, at least 96%, at least 97%, at least 98%, or at least 99% sequence identity to SEQ ID NO: 133. In some embodiments, the polypeptide having protease activity comprises an amino acid sequence having at least 50%, at least 60%, at least 70%, at least 80%, at least 81%, at least 82%, at least 83%, at least 84%, at least 85%, at least 86%, at least 87%, at least 88%, at least 89%, at least 90%, at least 91%, at least 92%, at least 93%, at least 94%, at least 95%, at least 96%, at least 97%, at least 98%, or at least 99% sequence identity to SEQ ID NO: 134. In some embodiments, the polypeptide having protease activity comprises an amino acid sequence having at least 50%, at least 60%, at least 70%, at least 80%, at least 81%, at least 82%, at least 83%, at least 84%, at least 85%, at least 86%, at least 87%, at least 88%, at least 89%, at least 90%, at least 91%, at least 92%, at least 93%, at least 94%, at least 95%, at least 96%, at least 97%, at least 98%, or at least 99% sequence identity to SEQ ID NO: 135. In some embodiments, the polypeptide having protease activity comprises an amino acid sequence having at least 50%, at least 60%, at least 70%, at least 80%, at least 81%, at least 82%, at least 83%, at least 84%, at least 85%, at least 86%, at least 87%, at least 88%, at least 89%, at least 90%, at least 91%, at least 92%, at least 93%, at least 94%, at least 95%, at least 96%, at least 97%, at least 98%, or at least 99% sequence identity to SEQ ID NO: 136. In some embodiments, the polypeptide having protease activity comprises an amino acid sequence having at least 50%, at least 60%, at least 70%, at least 80%, at least 81%, at least 82%, at least 83%, at least 84%, at least 85%, at least 86%, at least 87%, at least 88%, at least 89%, at least 90%, at least 91%, at least 92%, at least 93%, at least 94%, at least 95%, at least 96%, at least 97%, at least 98%, or at least 99% sequence identity to SEQ ID NO: 137. In some embodiments, the polypeptide having protease activity comprises an amino acid sequence having at least 50%, at least 60%, at least 70%, at least 80%, at least 81%, at least 82%, at least 83%, at least 84%, at least 85%, at least 86%, at least 87%, at least 88%, at least 89%, at least 90%, at least 91%, at least 92%, at least 93%, at least 94%, at least 95%, at least 96%, at least 97%, at least 98%, or at least 99% sequence identity to SEQ ID NO: 138. In some embodiments, the polypeptide having protease activity comprises an amino acid sequence having at least 50%, at least 60%, at least 70%, at least 80%, at least 81%, at least 82%, at least 83%, at least 84%, at least 85%, at least 86%, at least 87%, at least 88%, at least 89%, at least 90%, at least 91%, at least 92%, at least 93%, at least 94%, at least 95%, at least 96%, at least 97%, at least 98%, or at least 99% sequence identity to SEQ ID NO: 139. In some embodiments, the polypeptide having protease activity comprises an amino acid sequence having at least 50%, at least 60%, at least 70%, at least 80%, at least 81%, at least 82%, at least 83%, at least 84%, at least 85%, at least 86%, at least 87%, at least 88%, at least 89%, at least 90%, at least 91%, at least 92%, at least 93%, at least 94%, at least 95%, at least 96%, at least 97%, at least 98%, or at least 99% sequence identity to SEQ ID NO: 140. In some embodiments, the polypeptide having protease activity comprises an amino acid sequence having at least 50%, at least 60%, at least 70%, at least 80%, at least 81%, at least 82%, at least 83%, at least 84%, at least 85%, at least 86%, at least 87%, at least 88%, at least 89%, at least 90%, at least 91%, at least 92%, at least 93%, at least 94%, at least 95%, at least 96%, at least 97%, at least 98%, or at least 99% sequence identity to SEQ ID NO: 141. In some embodiments, the polypeptide having protease activity comprises an amino acid sequence having at least 50%, at least 60%, at least 70%, at least 80%, at least 81%, at least 82%, at least 83%, at least 84%, at least 85%, at least 86%, at least 87%, at least 88%, at least 89%, at least 90%, at least 91%, at least 92%, at least 93%, at least 94%, at least 95%, at least 96%, at least 97%, at least 98%, or at least 99% sequence identity to SEQ ID NO: 142. In some embodiments, the polypeptide having protease activity comprises an amino acid sequence having at least 50%, at least 60%, at least 70%, at least 80%, at least 81%, at least 82%, at least 83%, at least 84%, at least 85%, at least 86%, at least 87%, at least 88%, at least 89%, at least 90%, at least 91%, at least 92%, at least 93%, at least 94%, at least 95%, at least 96%, at least 97%, at least 98%, or at least 99% sequence identity to SEQ ID NO: 143. In some embodiments, the polypeptide having protease activity comprises an amino acid sequence having at least 50%, at least 60%, at least 70%, at least 80%, at least 81%, at least 82%, at least 83%, at least 84%, at least 85%, at least 86%, at least 87%, at least 88%, at least 89%, at least 90%, at least 91%, at least 92%, at least 93%, at least 94%, at least 95%, at least 96%, at least 97%, at least 98%, or at least 99% sequence identity to SEQ ID NO: 144. In some embodiments, the polypeptide having protease activity comprises an amino acid sequence having at least 50%, at least 60%, at least 70%, at least 80%, at least 81%, at least 82%, at least 83%, at least 84%, at least 85%, at least 86%, at least 87%, at least 88%, at least 89%, at least 90%, at least 91%, at least 92%, at least 93%, at least 94%, at least 95%, at least 96%, at least 97%, at least 98%, or at least 99% sequence identity to SEQ ID NO: 145. In some embodiments, the polypeptide having protease activity comprises an amino acid sequence having at least 50%, at least 60%, at least 70%, at least 80%, at least 81%, at least 82%, at least 83%, at least 84%, at least 85%, at least 86%, at least 87%, at least 88%, at least 89%, at least 90%, at least 91%, at least 92%, at least 93%, at least 94%, at least 95%, at least 96%, at least 97%, at least 98%, or at least 99% sequence identity to SEQ ID NO: 146. In some embodiments, the polypeptide having protease activity comprises an amino acid sequence having at least 50%, at least 60%, at least 70%, at least 80%, at least 81%, at least 82%, at least 83%, at least 84%, at least 85%, at least 86%, at least 87%, at least 88%, at least 89%, at least 90%, at least 91%, at least 92%, at least 93%, at least 94%, at least 95%, at least 96%, at least 97%, at least 98%, or at least 99% sequence identity to SEQ ID NO: 147. In some embodiments, the polypeptide having protease activity comprises an amino acid sequence having at least 50%, at least 60%, at least 70%, at least 80%, at least 81%, at least 82%, at least 83%, at least 84%, at least 85%, at least 86%, at least 87%, at least 88%, at least 89%, at least 90%, at least 91%, at least 92%, at least 93%, at least 94%, at least 95%, at least 96%, at least 97%, at least 98%, or at least 99% sequence identity to SEQ ID NO: 148. In some embodiments, the polypeptide having protease activity comprises an amino acid sequence having at least 50%, at least 60%, at least 70%, at least 80%, at least 81%, at least 82%, at least 83%, at least 84%, at least 85%, at least 86%, at least 87%, at least 88%, at least 89%, at least 90%, at least 91%, at least 92%, at least 93%, at least 94%, at least 95%, at least 96%, at least 97%, at least 98%, or at least 99% sequence identity to SEQ ID NO: 149. In some embodiments, the polypeptide having protease activity comprises an amino acid sequence having at least 50%, at least 60%, at least 70%, at least 80%, at least 81%, at least 82%, at least 83%, at least 84%, at least 85%, at least 86%, at least 87%, at least 88%, at least 89%, at least 90%, at least 91%, at least 92%, at least 93%, at least 94%, at least 95%, at least 96%, at least 97%, at least 98%, or at least 99% sequence identity to SEQ ID NO: 150. In some embodiments, the polypeptide having protease activity comprises an amino acid sequence having at least 50%, at least 60%, at least 70%, at least 80%, at least 81%, at least 82%, at least 83%, at least 84%, at least 85%, at least 86%, at least 87%, at least 88%, at least 89%, at least 90%, at least 91%, at least 92%, at least 93%, at least 94%, at least 95%, at least 96%, at least 97%, at least 98%, or at least 99% sequence identity to SEQ ID NO: 151. In some embodiments, the polypeptide having protease activity comprises an amino acid sequence having at least 50%, at least 60%, at least 70%, at least 80%, at least 81%, at least 82%, at least 83%, at least 84%, at least 85%, at least 86%, at least 87%, at least 88%, at least 89%, at least 90%, at least 91%, at least 92%, at least 93%, at least 94%, at least 95%, at least 96%, at least 97%, at least 98%, or at least 99% sequence identity to SEQ ID NO: 152. In some embodiments, the polypeptide having protease activity comprises an amino acid sequence having at least 50%, at least 60%, at least 70%, at least 80%, at least 81%, at least 82%, at least 83%, at least 84%, at least 85%, at least 86%, at least 87%, at least 88%, at least 89%, at least 90%, at least 91%, at least 92%, at least 93%, at least 94%, at least 95%, at least 96%, at least 97%, at least 98%, or at least 99% sequence identity to SEQ ID NO: 153. In some embodiments, the polypeptide having protease activity comprises an amino acid sequence having at least 50%, at least 60%, at least 70%, at least 80%, at least 81%, at least 82%, at least 83%, at least 84%, at least 85%, at least 86%, at least 87%, at least 88%, at least 89%, at least 90%, at least 91%, at least 92%, at least 93%, at least 94%, at least 95%, at least 96%, at least 97%, at least 98%, or at least 99% sequence identity to SEQ ID NO: 154. In some embodiments, the polypeptide having protease activity comprises an amino acid sequence having at least 50%, at least 60%, at least 70%, at least 80%, at least 81%, at least 82%, at least 83%, at least 84%, at least 85%, at least 86%, at least 87%, at least 88%, at least 89%, at least 90%, at least 91%, at least 92%, at least 93%, at least 94%, at least 95%, at least 96%, at least 97%, at least 98%, or at least 99% sequence identity to SEQ ID NO: 155. In some embodiments, the polypeptide having protease activity comprises an amino acid sequence having at least 50%, at least 60%, at least 70%, at least 80%, at least 81%, at least 82%, at least 83%, at least 84%, at least 85%, at least 86%, at least 87%, at least 88%, at least 89%, at least 90%, at least 91%, at least 92%, at least 93%, at least 94%, at least 95%, at least 96%, at least 97%, at least 98%, or at least 99% sequence identity to SEQ ID NO: 156. In some embodiments, the polypeptide having protease activity comprises an amino acid sequence having at least 50%, at least 60%, at least 70%, at least 80%, at least 81%, at least 82%, at least 83%, at least 84%, at least 85%, at least 86%, at least 87%, at least 88%, at least 89%, at least 90%, at least 91%, at least 92%, at least 93%, at least 94%, at least 95%, at least 96%, at least 97%, at least 98%, or at least 99% sequence identity to SEQ ID NO: 157. In some embodiments, the polypeptide having protease activity comprises an amino acid sequence having at least 50%, at least 60%, at least 70%, at least 80%, at least 81%, at least 82%, at least 83%, at least 84%, at least 85%, at least 86%, at least 87%, at least 88%, at least 89%, at least 90%, at least 91%, at least 92%, at least 93%, at least 94%, at least 95%, at least 96%, at least 97%, at least 98%, or at least 99% sequence identity to SEQ ID NO: 158. In some embodiments, the polypeptide having protease activity comprises an amino acid sequence having at least 50%, at least 60%, at least 70%, at least 80%, at least 81%, at least 82%, at least 83%, at least 84%, at least 85%, at least 86%, at least 87%, at least 88%, at least 89%, at least 90%, at least 91%, at least 92%, at least 93%, at least 94%, at least 95%, at least 96%, at least 97%, at least 98%, or at least 99% sequence identity to SEQ ID NO: 159. In some embodiments, the polypeptide having protease activity comprises an amino acid sequence having at least 50%, at least 60%, at least 70%, at least 80%, at least 81%, at least 82%, at least 83%, at least 84%, at least 85%, at least 86%, at least 87%, at least 88%, at least 89%, at least 90%, at least 91%, at least 92%, at least 93%, at least 94%, at least 95%, at least 96%, at least 97%, at least 98%, or at least 99% sequence identity to SEQ ID NO: 160. In some embodiments, the polypeptide having protease activity comprises an amino acid sequence having at least 50%, at least 60%, at least 70%, at least 80%, at least 81%, at least 82%, at least 83%, at least 84%, at least 85%, at least 86%, at least 87%, at least 88%, at least 89%, at least 90%, at least 91%, at least 92%, at least 93%, at least 94%, at least 95%, at least 96%, at least 97%, at least 98%, or at least 99% sequence identity to SEQ ID NO: 161. In some embodiments, the polypeptide having protease activity comprises an amino acid sequence having at least 50%, at least 60%, at least 70%, at least 80%, at least 81%, at least 82%, at least 83%, at least 84%, at least 85%, at least 86%, at least 87%, at least 88%, at least 89%, at least 90%, at least 91%, at least 92%, at least 93%, at least 94%, at least 95%, at least 96%, at least 97%, at least 98%, or at least 99% sequence identity to SEQ ID NO: 162. In some embodiments, the polypeptide having protease activity comprises an amino acid sequence having at least 50%, at least 60%, at least 70%, at least 80%, at least 81%, at least 82%, at least 83%, at least 84%, at least 85%, at least 86%, at least 87%, at least 88%, at least 89%, at least 90%, at least 91%, at least 92%, at least 93%, at least 94%, at least 95%, at least 96%, at least 97%, at least 98%, or at least 99% sequence identity to SEQ ID NO: 163. In some embodiments, the polypeptide having protease activity comprises an amino acid sequence having at least 50%, at least 60%, at least 70%, at least 80%, at least 81%, at least 82%, at least 83%, at least 84%, at least 85%, at least 86%, at least 87%, at least 88%, at least 89%, at least 90%, at least 91%, at least 92%, at least 93%, at least 94%, at least 95%, at least 96%, at least 97%, at least 98%, or at least 99% sequence identity to SEQ ID NO: 164. In some embodiments, the polypeptide having protease activity comprises an amino acid sequence having at least 50%, at least 60%, at least 70%, at least 80%, at least 81%, at least 82%, at least 83%, at least 84%, at least 85%, at least 86%, at least 87%, at least 88%, at least 89%, at least 90%, at least 91%, at least 92%, at least 93%, at least 94%, at least 95%, at least 96%, at least 97%, at least 98%, or at least 99% sequence identity to SEQ ID NO: 165. In some embodiments, the polypeptide having protease activity comprises an amino acid sequence having at least 50%, at least 60%, at least 70%, at least 80%, at least 81%, at least 82%, at least 83%, at least 84%, at least 85%, at least 86%, at least 87%, at least 88%, at least 89%, at least 90%, at least 91%, at least 92%, at least 93%, at least 94%, at least 95%, at least 96%, at least 97%, at least 98%, or at least 99% sequence identity to SEQ ID NO: 166. In some embodiments, the polypeptide having protease activity comprises an amino acid sequence having at least 50%, at least 60%, at least 70%, at least 80%, at least 81%, at least 82%, at least 83%, at least 84%, at least 85%, at least 86%, at least 87%, at least 88%, at least 89%, at least 90%, at least 91%, at least 92%, at least 93%, at least 94%, at least 95%, at least 96%, at least 97%, at least 98%, or at least 99% sequence identity to SEQ ID NO: 167. In some embodiments, the polypeptide having protease activity comprises an amino acid sequence having at least 50%, at least 60%, at least 70%, at least 80%, at least 81%, at least 82%, at least 83%, at least 84%, at least 85%, at least 86%, at least 87%, at least 88%, at least 89%, at least 90%, at least 91%, at least 92%, at least 93%, at least 94%, at least 95%, at least 96%, at least 97%, at least 98%, or at least 99% sequence identity to SEQ ID NO: 168. In some embodiments, the polypeptide having protease activity comprises an amino acid sequence having at least 50%, at least 60%, at least 70%, at least 80%, at least 81%, at least 82%, at least 83%, at least 84%, at least 85%, at least 86%, at least 87%, at least 88%, at least 89%, at least 90%, at least 91%, at least 92%, at least 93%, at least 94%, at least 95%, at least 96%, at least 97%, at least 98%, or at least 99% sequence identity to SEQ ID NO: 169. In some embodiments, the polypeptide having protease activity comprises an amino acid sequence having at least 50%, at least 60%, at least 70%, at least 80%, at least 81%, at least 82%, at least 83%, at least 84%, at least 85%, at least 86%, at least 87%, at least 88%, at least 89%, at least 90%, at least 91%, at least 92%, at least 93%, at least 94%, at least 95%, at least 96%, at least 97%, at least 98%, or at least 99% sequence identity to SEQ ID NO: 170. In some embodiments, the polypeptide having protease activity comprises an amino acid sequence having at least 50%, at least 60%, at least 70%, at least 80%, at least 81%, at least 82%, at least 83%, at least 84%, at least 85%, at least 86%, at least 87%, at least 88%, at least 89%, at least 90%, at least 91%, at least 92%, at least 93%, at least 94%, at least 95%, at least 96%, at least 97%, at least 98%, or at least 99% sequence identity to SEQ ID NO: 171. In some embodiments, the polypeptide having protease activity comprises an amino acid sequence having at least 50%, at least 60%, at least 70%, at least 80%, at least 81%, at least 82%, at least 83%, at least 84%, at least 85%, at least 86%, at least 87%, at least 88%, at least 89%, at least 90%, at least 91%, at least 92%, at least 93%, at least 94%, at least 95%, at least 96%, at least 97%, at least 98%, or at least 99% sequence identity to SEQ ID NO: 172. In some embodiments, the polypeptide having protease activity comprises an amino acid sequence having at least 50%, at least 60%, at least 70%, at least 80%, at least 81%, at least 82%, at least 83%, at least 84%, at least 85%, at least 86%, at least 87%, at least 88%, at least 89%, at least 90%, at least 91%, at least 92%, at least 93%, at least 94%, at least 95%, at least 96%, at least 97%, at least 98%, or at least 99% sequence identity to SEQ ID NO: 173. In some embodiments, the polypeptide having protease activity comprises an amino acid sequence having at least 50%, at least 60%, at least 70%, at least 80%, at least 81%, at least 82%, at least 83%, at least 84%, at least 85%, at least 86%, at least 87%, at least 88%, at least 89%, at least 90%, at least 91%, at least 92%, at least 93%, at least 94%, at least 95%, at least 96%, at least 97%, at least 98%, or at least 99% sequence identity to SEQ ID NO: 174. In some embodiments, the polypeptide having protease activity comprises an amino acid sequence having at least 50%, at least 60%, at least 70%, at least 80%, at least 81%, at least 82%, at least 83%, at least 84%, at least 85%, at least 86%, at least 87%, at least 88%, at least 89%, at least 90%, at least 91%, at least 92%, at least 93%, at least 94%, at least 95%, at least 96%, at least 97%, at least 98%, or at least 99% sequence identity to SEQ ID NO: 175. In some embodiments, the polypeptide having protease activity comprises an amino acid sequence having at least 50%, at least 60%, at least 70%, at least 80%, at least 81%, at least 82%, at least 83%, at least 84%, at least 85%, at least 86%, at least 87%, at least 88%, at least 89%, at least 90%, at least 91%, at least 92%, at least 93%, at least 94%, at least 95%, at least 96%, at least 97%, at least 98%, or at least 99% sequence identity to SEQ ID NO: 176. In some embodiments, the polypeptide having protease activity comprises an amino acid sequence having at least 50%, at least 60%, at least 70%, at least 80%, at least 81%, at least 82%, at least 83%, at least 84%, at least 85%, at least 86%, at least 87%, at least 88%, at least 89%, at least 90%, at least 91%, at least 92%, at least 93%, at least 94%, at least 95%, at least 96%, at least 97%, at least 98%, or at least 99% sequence identity to SEQ ID NO: 177. In some embodiments, the polypeptide having protease activity comprises an amino acid sequence having at least 50%, at least 60%, at least 70%, at least 80%, at least 81%, at least 82%, at least 83%, at least 84%, at least 85%, at least 86%, at least 87%, at least 88%, at least 89%, at least 90%, at least 91%, at least 92%, at least 93%, at least 94%, at least 95%, at least 96%, at least 97%, at least 98%, or at least 99% sequence identity to SEQ ID NO: 178. In some embodiments, the polypeptide having protease activity comprises an amino acid sequence having at least 50%, at least 60%, at least 70%, at least 80%, at least 81%, at least 82%, at least 83%, at least 84%, at least 85%, at least 86%, at least 87%, at least 88%, at least 89%, at least 90%, at least 91%, at least 92%, at least 93%, at least 94%, at least 95%, at least 96%, at least 97%, at least 98%, or at least 99% sequence identity to SEQ ID NO: 179. In some embodiments, the polypeptide having protease activity comprises an amino acid sequence having at least 50%, at least 60%, at least 70%, at least 80%, at least 81%, at least 82%, at least 83%, at least 84%, at least 85%, at least 86%, at least 87%, at least 88%, at least 89%, at least 90%, at least 91%, at least 92%, at least 93%, at least 94%, at least 95%, at least 96%, at least 97%, at least 98%, or at least 99% sequence identity to SEQ ID NO: 180. In some embodiments, the polypeptide having protease activity comprises an amino acid sequence having at least 50%, at least 60%, at least 70%, at least 80%, at least 81%, at least 82%, at least 83%, at least 84%, at least 85%, at least 86%, at least 87%, at least 88%, at least 89%, at least 90%, at least 91%, at least 92%, at least 93%, at least 94%, at least 95%, at least 96%, at least 97%, at least 98%, or at least 99% sequence identity to SEQ ID NO: 181. In some embodiments, the polypeptide having protease activity comprises an amino acid sequence having at least 50%, at least 60%, at least 70%, at least 80%, at least 81%, at least 82%, at least 83%, at least 84%, at least 85%, at least 86%, at least 87%, at least 88%, at least 89%, at least 90%, at least 91%, at least 92%, at least 93%, at least 94%, at least 95%, at least 96%, at least 97%, at least 98%, or at least 99% sequence identity to SEQ ID NO: 182. In some embodiments, the polypeptide having protease activity comprises an amino acid sequence having at least 50%, at least 60%, at least 70%, at least 80%, at least 81%, at least 82%, at least 83%, at least 84%, at least 85%, at least 86%, at least 87%, at least 88%, at least 89%, at least 90%, at least 91%, at least 92%, at least 93%, at least 94%, at least 95%, at least 96%, at least 97%, at least 98%, or at least 99% sequence identity to SEQ ID NO: 183. In some embodiments, the polypeptide having protease activity comprises an amino acid sequence having at least 50%, at least 60%, at least 70%, at least 80%, at least 81%, at least 82%, at least 83%, at least 84%, at least 85%, at least 86%, at least 87%, at least 88%, at least 89%, at least 90%, at least 91%, at least 92%, at least 93%, at least 94%, at least 95%, at least 96%, at least 97%, at least 98%, or at least 99% sequence identity to SEQ ID NO: 184. In some embodiments, the polypeptide having protease activity comprises an amino acid sequence having at least 50%, at least 60%, at least 70%, at least 80%, at least 81%, at least 82%, at least 83%, at least 84%, at least 85%, at least 86%, at least 87%, at least 88%, at least 89%, at least 90%, at least 91%, at least 92%, at least 93%, at least 94%, at least 95%, at least 96%, at least 97%, at least 98%, or at least 99% sequence identity to SEQ ID NO: 185. In some embodiments, the polypeptide having protease activity comprises an amino acid sequence having at least 50%, at least 60%, at least 70%, at least 80%, at least 81%, at least 82%, at least 83%, at least 84%, at least 85%, at least 86%, at least 87%, at least 88%, at least 89%, at least 90%, at least 91%, at least 92%, at least 93%, at least 94%, at least 95%, at least 96%, at least 97%, at least 98%, or at least 99% sequence identity to SEQ ID NO: 186. In some embodiments, the polypeptide having protease activity comprises an amino acid sequence having at least 50%, at least 60%, at least 70%, at least 80%, at least 81%, at least 82%, at least 83%, at least 84%, at least 85%, at least 86%, at least 87%, at least 88%, at least 89%, at least 90%, at least 91%, at least 92%, at least 93%, at least 94%, at least 95%, at least 96%, at least 97%, at least 98%, or at least 99% sequence identity to SEQ ID NO: 187. In some embodiments, the polypeptide having protease activity comprises an amino acid sequence having at least 50%, at least 60%, at least 70%, at least 80%, at least 81%, at least 82%, at least 83%, at least 84%, at least 85%, at least 86%, at least 87%, at least 88%, at least 89%, at least 90%, at least 91%, at least 92%, at least 93%, at least 94%, at least 95%, at least 96%, at least 97%, at least 98%, or at least 99% sequence identity to SEQ ID NO: 188. In some embodiments, the polypeptide having protease activity comprises an amino acid sequence having at least 50%, at least 60%, at least 70%, at least 80%, at least 81%, at least 82%, at least 83%, at least 84%, at least 85%, at least 86%, at least 87%, at least 88%, at least 89%, at least 90%, at least 91%, at least 92%, at least 93%, at least 94%, at least 95%, at least 96%, at least 97%, at least 98%, or at least 99% sequence identity to SEQ ID NO: 189. In some embodiments, the polypeptide having protease activity comprises an amino acid sequence having at least 50%, at least 60%, at least 70%, at least 80%, at least 81%, at least 82%, at least 83%, at least 84%, at least 85%, at least 86%, at least 87%, at least 88%, at least 89%, at least 90%, at least 91%, at least 92%, at least 93%, at least 94%, at least 95%, at least 96%, at least 97%, at least 98%, or at least 99% sequence identity to SEQ ID NO: 190. In some embodiments, the polypeptide having protease activity comprises an amino acid sequence having at least 50%, at least 60%, at least 70%, at least 80%, at least 81%, at least 82%, at least 83%, at least 84%, at least 85%, at least 86%, at least 87%, at least 88%, at least 89%, at least 90%, at least 91%, at least 92%, at least 93%, at least 94%, at least 95%, at least 96%, at least 97%, at least 98%, or at least 99% sequence identity to SEQ ID NO: 191. In some embodiments, the polypeptide having protease activity comprises an amino acid sequence having at least 50%, at least 60%, at least 70%, at least 80%, at least 81%, at least 82%, at least 83%, at least 84%, at least 85%, at least 86%, at least 87%, at least 88%, at least 89%, at least 90%, at least 91%, at least 92%, at least 93%, at least 94%, at least 95%, at least 96%, at least 97%, at least 98%, or at least 99% sequence identity to SEQ ID NO: 192. In some embodiments, the polypeptide having protease activity comprises an amino acid sequence having at least 50%, at least 60%, at least 70%, at least 80%, at least 81%, at least 82%, at least 83%, at least 84%, at least 85%, at least 86%, at least 87%, at least 88%, at least 89%, at least 90%, at least 91%, at least 92%, at least 93%, at least 94%, at least 95%, at least 96%, at least 97%, at least 98%, or at least 99% sequence identity to SEQ ID NO: 193. In some embodiments, the polypeptide having protease activity comprises an amino acid sequence having at least 50%, at least 60%, at least 70%, at least 80%, at least 81%, at least 82%, at least 83%, at least 84%, at least 85%, at least 86%, at least 87%, at least 88%, at least 89%, at least 90%, at least 91%, at least 92%, at least 93%, at least 94%, at least 95%, at least 96%, at least 97%, at least 98%, or at least 99% sequence identity to SEQ ID NO: 194. In some embodiments, the polypeptide having protease activity comprises an amino acid sequence having at least 50%, at least 60%, at least 70%, at least 80%, at least 81%, at least 82%, at least 83%, at least 84%, at least 85%, at least 86%, at least 87%, at least 88%, at least 89%, at least 90%, at least 91%, at least 92%, at least 93%, at least 94%, at least 95%, at least 96%, at least 97%, at least 98%, or at least 99% sequence identity to SEQ ID NO: 195. In some embodiments, the polypeptide having protease activity comprises an amino acid sequence having at least 50%, at least 60%, at least 70%, at least 80%, at least 81%, at least 82%, at least 83%, at least 84%, at least 85%, at least 86%, at least 87%, at least 88%, at least 89%, at least 90%, at least 91%, at least 92%, at least 93%, at least 94%, at least 95%, at least 96%, at least 97%, at least 98%, or at least 99% sequence identity to SEQ ID NO: 196. In some embodiments, the polypeptide having protease activity comprises an amino acid sequence having at least 50%, at least 60%, at least 70%, at least 80%, at least 81%, at least 82%, at least 83%, at least 84%, at least 85%, at least 86%, at least 87%, at least 88%, at least 89%, at least 90%, at least 91%, at least 92%, at least 93%, at least 94%, at least 95%, at least 96%, at least 97%, at least 98%, or at least 99% sequence identity to SEQ ID NO: 197. In some embodiments, the polypeptide having protease activity comprises an amino acid sequence having at least 50%, at least 60%, at least 70%, at least 80%, at least 81%, at least 82%, at least 83%, at least 84%, at least 85%, at least 86%, at least 87%, at least 88%, at least 89%, at least 90%, at least 91%, at least 92%, at least 93%, at least 94%, at least 95%, at least 96%, at least 97%, at least 98%, or at least 99% sequence identity to SEQ ID NO: 198. In some embodiments, the polypeptide having protease activity comprises an amino acid sequence having at least 50%, at least 60%, at least 70%, at least 80%, at least 81%, at least 82%, at least 83%, at least 84%, at least 85%, at least 86%, at least 87%, at least 88%, at least 89%, at least 90%, at least 91%, at least 92%, at least 93%, at least 94%, at least 95%, at least 96%, at least 97%, at least 98%, or at least 99% sequence identity to SEQ ID NO: 199. In some embodiments, the polypeptide having protease activity comprises an amino acid sequence having at least 50%, at least 60%, at least 70%, at least 80%, at least 81%, at least 82%, at least 83%, at least 84%, at least 85%, at least 86%, at least 87%, at least 88%, at least 89%, at least 90%, at least 91%, at least 92%, at least 93%, at least 94%, at least 95%, at least 96%, at least 97%, at least 98%, or at least 99% sequence identity to SEQ ID NO: 200. In some embodiments, the polypeptide having protease activity comprises an amino acid sequence having at least 50%, at least 60%, at least 70%, at least 80%, at least 81%, at least 82%, at least 83%, at least 84%, at least 85%, at least 86%, at least 87%, at least 88%, at least 89%, at least 90%, at least 91%, at least 92%, at least 93%, at least 94%, at least 95%, at least 96%, at least 97%, at least 98%, or at least 99% sequence identity to SEQ ID NO: 201. In some embodiments, the polypeptide having protease activity comprises an amino acid sequence having at least 50%, at least 60%, at least 70%, at least 80%, at least 81%, at least 82%, at least 83%, at least 84%, at least 85%, at least 86%, at least 87%, at least 88%, at least 89%, at least 90%, at least 91%, at least 92%, at least 93%, at least 94%, at least 95%, at least 96%, at least 97%, at least 98%, or at least 99% sequence identity to SEQ ID NO: 202. In some embodiments, the polypeptide having protease activity comprises an amino acid sequence having at least 50%, at least 60%, at least 70%, at least 80%, at least 81%, at least 82%, at least 83%, at least 84%, at least 85%, at least 86%, at least 87%, at least 88%, at least 89%, at least 90%, at least 91%, at least 92%, at least 93%, at least 94%, at least 95%, at least 96%, at least 97%, at least 98%, or at least 99% sequence identity to SEQ ID NO: 203. In some embodiments, the polypeptide having protease activity comprises an amino acid sequence having at least 50%, at least 60%, at least 70%, at least 80%, at least 81%, at least 82%, at least 83%, at least 84%, at least 85%, at least 86%, at least 87%, at least 88%, at least 89%, at least 90%, at least 91%, at least 92%, at least 93%, at least 94%, at least 95%, at least 96%, at least 97%, at least 98%, or at least 99% sequence identity to SEQ ID NO: 204. In some embodiments, the polypeptide having protease activity comprises an amino acid sequence having at least 50%, at least 60%, at least 70%, at least 80%, at least 81%, at least 82%, at least 83%, at least 84%, at least 85%, at least 86%, at least 87%, at least 88%, at least 89%, at least 90%, at least 91%, at least 92%, at least 93%, at least 94%, at least 95%, at least 96%, at least 97%, at least 98%, or at least 99% sequence identity to SEQ ID NO: 205. In some embodiments, the polypeptide having protease activity comprises an amino acid sequence having at least 50%, at least 60%, at least 70%, at least 80%, at least 81%, at least 82%, at least 83%, at least 84%, at least 85%, at least 86%, at least 87%, at least 88%, at least 89%, at least 90%, at least 91%, at least 92%, at least 93%, at least 94%, at least 95%, at least 96%, at least 97%, at least 98%, or at least 99% sequence identity to SEQ ID NO: 206. In some embodiments, the polypeptide having protease activity comprises an amino acid sequence having at least 50%, at least 60%, at least 70%, at least 80%, at least 81%, at least 82%, at least 83%, at least 84%, at least 85%, at least 86%, at least 87%, at least 88%, at least 89%, at least 90%, at least 91%, at least 92%, at least 93%, at least 94%, at least 95%, at least 96%, at least 97%, at least 98%, or at least 99% sequence identity to SEQ ID NO: 207. In some embodiments, the polypeptide having protease activity comprises an amino acid sequence having at least 50%, at least 60%, at least 70%, at least 80%, at least 81%, at least 82%, at least 83%, at least 84%, at least 85%, at least 86%, at least 87%, at least 88%, at least 89%, at least 90%, at least 91%, at least 92%, at least 93%, at least 94%, at least 95%, at least 96%, at least 97%, at least 98%, or at least 99% sequence identity to SEQ ID NO: 208. In some embodiments, the polypeptide having protease activity comprises an amino acid sequence having at least 50%, at least 60%, at least 70%, at least 80%, at least 81%, at least 82%, at least 83%, at least 84%, at least 85%, at least 86%, at least 87%, at least 88%, at least 89%, at least 90%, at least 91%, at least 92%, at least 93%, at least 94%, at least 95%, at least 96%, at least 97%, at least 98%, or at least 99% sequence identity to SEQ ID NO: 209. In some embodiments, the polypeptide having protease activity comprises an amino acid sequence having at least 50%, at least 60%, at least 70%, at least 80%, at least 81%, at least 82%, at least 83%, at least 84%, at least 85%, at least 86%, at least 87%, at least 88%, at least 89%, at least 90%, at least 91%, at least 92%, at least 93%, at least 94%, at least 95%, at least 96%, at least 97%, at least 98%, or at least 99% sequence identity to SEQ ID NO: 210. In some embodiments, the polypeptide having protease activity comprises an amino acid sequence having at least 50%, at least 60%, at least 70%, at least 80%, at least 81%, at least 82%, at least 83%, at least 84%, at least 85%, at least 86%, at least 87%, at least 88%, at least 89%, at least 90%, at least 91%, at least 92%, at least 93%, at least 94%, at least 95%, at least 96%, at least 97%, at least 98%, or at least 99% sequence identity to SEQ ID NO: 211. In some embodiments, the polypeptide having protease activity comprises an amino acid sequence having at least 50%, at least 60%, at least 70%, at least 80%, at least 81%, at least 82%, at least 83%, at least 84%, at least 85%, at least 86%, at least 87%, at least 88%, at least 89%, at least 90%, at least 91%, at least 92%, at least 93%, at least 94%, at least 95%, at least 96%, at least 97%, at least 98%, or at least 99% sequence identity to SEQ ID NO: 212. In some embodiments, the polypeptide having protease activity comprises an amino acid sequence having at least 50%, at least 60%, at least 70%, at least 80%, at least 81%, at least 82%, at least 83%, at least 84%, at least 85%, at least 86%, at least 87%, at least 88%, at least 89%, at least 90%, at least 91%, at least 92%, at least 93%, at least 94%, at least 95%, at least 96%, at least 97%, at least 98%, or at least 99% sequence identity to SEQ ID NO: 213. In some embodiments, the polypeptide having protease activity comprises an amino acid sequence having at least 50%, at least 60%, at least 70%, at least 80%, at least 81%, at least 82%, at least 83%, at least 84%, at least 85%, at least 86%, at least 87%, at least 88%, at least 89%, at least 90%, at least 91%, at least 92%, at least 93%, at least 94%, at least 95%, at least 96%, at least 97%, at least 98%, or at least 99% sequence identity to SEQ ID NO: 214. In some embodiments, the polypeptide having protease activity comprises an amino acid sequence having at least 50%, at least 60%, at least 70%, at least 80%, at least 81%, at least 82%, at least 83%, at least 84%, at least 85%, at least 86%, at least 87%, at least 88%, at least 89%, at least 90%, at least 91%, at least 92%, at least 93%, at least 94%, at least 95%, at least 96%, at least 97%, at least 98%, or at least 99% sequence identity to SEQ ID NO: 215. In some embodiments, the polypeptide having protease activity comprises an amino acid sequence having at least 50%, at least 60%, at least 70%, at least 80%, at least 81%, at least 82%, at least 83%, at least 84%, at least 85%, at least 86%, at least 87%, at least 88%, at least 89%, at least 90%, at least 91%, at least 92%, at least 93%, at least 94%, at least 95%, at least 96%, at least 97%, at least 98%, or at least 99% sequence identity to SEQ ID NO: 216. In some embodiments, the polypeptide having protease activity comprises an amino acid sequence having at least 50%, at least 60%, at least 70%, at least 80%, at least 81%, at least 82%, at least 83%, at least 84%, at least 85%, at least 86%, at least 87%, at least 88%, at least 89%, at least 90%, at least 91%, at least 92%, at least 93%, at least 94%, at least 95%, at least 96%, at least 97%, at least 98%, or at least 99% sequence identity to SEQ ID NO: 217. In some embodiments, the polypeptide having protease activity comprises an amino acid sequence having at least 50%, at least 60%, at least 70%, at least 80%, at least 81%, at least 82%, at least 83%, at least 84%, at least 85%, at least 86%, at least 87%, at least 88%, at least 89%, at least 90%, at least 91%, at least 92%, at least 93%, at least 94%, at least 95%, at least 96%, at least 97%, at least 98%, or at least 99% sequence identity to SEQ ID NO: 218. In some embodiments, the polypeptide having protease activity comprises an amino acid sequence having at least 50%, at least 60%, at least 70%, at least 80%, at least 81%, at least 82%, at least 83%, at least 84%, at least 85%, at least 86%, at least 87%, at least 88%, at least 89%, at least 90%, at least 91%, at least 92%, at least 93%, at least 94%, at least 95%, at least 96%, at least 97%, at least 98%, or at least 99% sequence identity to SEQ ID NO: 219. In some embodiments, the polypeptide having protease activity comprises an amino acid sequence having at least 50%, at least 60%, at least 70%, at least 80%, at least 81%, at least 82%, at least 83%, at least 84%, at least 85%, at least 86%, at least 87%, at least 88%, at least 89%, at least 90%, at least 91%, at least 92%, at least 93%, at least 94%, at least 95%, at least 96%, at least 97%, at least 98%, or at least 99% sequence identity to SEQ ID NO: 220. In some embodiments, the polypeptide having protease activity comprises an amino acid sequence having at least 50%, at least 60%, at least 70%, at least 80%, at least 81%, at least 82%, at least 83%, at least 84%, at least 85%, at least 86%, at least 87%, at least 88%, at least 89%, at least 90%, at least 91%, at least 92%, at least 93%, at least 94%, at least 95%, at least 96%, at least 97%, at least 98%, or at least 99% sequence identity to SEQ ID NO: 221. In some embodiments, the polypeptide having protease activity comprises an amino acid sequence having at least 50%, at least 60%, at least 70%, at least 80%, at least 81%, at least 82%, at least 83%, at least 84%, at least 85%, at least 86%, at least 87%, at least 88%, at least 89%, at least 90%, at least 91%, at least 92%, at least 93%, at least 94%, at least 95%, at least 96%, at least 97%, at least 98%, or at least 99% sequence identity to SEQ ID NO: 222. In some embodiments, the polypeptide having protease activity comprises an amino acid sequence having at least 50%, at least 60%, at least 70%, at least 80%, at least 81%, at least 82%, at least 83%, at least 84%, at least 85%, at least 86%, at least 87%, at least 88%, at least 89%, at least 90%, at least 91%, at least 92%, at least 93%, at least 94%, at least 95%, at least 96%, at least 97%, at least 98%, or at least 99% sequence identity to SEQ ID NO: 223. In some embodiments, the polypeptide having protease activity comprises an amino acid sequence having at least 50%, at least 60%, at least 70%, at least 80%, at least 81%, at least 82%, at least 83%, at least 84%, at least 85%, at least 86%, at least 87%, at least 88%, at least 89%, at least 90%, at least 91%, at least 92%, at least 93%, at least 94%, at least 95%, at least 96%, at least 97%, at least 98%, or at least 99% sequence identity to SEQ ID NO: 224. In some embodiments, the polypeptide having protease activity comprises an amino acid sequence having at least 50%, at least 60%, at least 70%, at least 80%, at least 81%, at least 82%, at least 83%, at least 84%, at least 85%, at least 86%, at least 87%, at least 88%, at least 89%, at least 90%, at least 91%, at least 92%, at least 93%, at least 94%, at least 95%, at least 96%, at least 97%, at least 98%, or at least 99% sequence identity to SEQ ID NO: 225. In some embodiments, the polypeptide having protease activity comprises an amino acid sequence having at least 50%, at least 60%, at least 70%, at least 80%, at least 81%, at least 82%, at least 83%, at least 84%, at least 85%, at least 86%, at least 87%, at least 88%, at least 89%, at least 90%, at least 91%, at least 92%, at least 93%, at least 94%, at least 95%, at least 96%, at least 97%, at least 98%, or at least 99% sequence identity to SEQ ID NO: 226. In some embodiments, the polypeptide having protease activity comprises an amino acid sequence having at least 50%, at least 60%, at least 70%, at least 80%, at least 81%, at least 82%, at least 83%, at least 84%, at least 85%, at least 86%, at least 87%, at least 88%, at least 89%, at least 90%, at least 91%, at least 92%, at least 93%, at least 94%, at least 95%, at least 96%, at least 97%, at least 98%, or at least 99% sequence identity to SEQ ID NO: 227. In some embodiments, the polypeptide having protease activity comprises an amino acid sequence having at least 50%, at least 60%, at least 70%, at least 80%, at least 81%, at least 82%, at least 83%, at least 84%, at least 85%, at least 86%, at least 87%, at least 88%, at least 89%, at least 90%, at least 91%, at least 92%, at least 93%, at least 94%, at least 95%, at least 96%, at least 97%, at least 98%, or at least 99% sequence identity to SEQ ID NO: 228. In some embodiments, the polypeptide having protease activity comprises an amino acid sequence having at least 50%, at least 60%, at least 70%, at least 80%, at least 81%, at least 82%, at least 83%, at least 84%, at least 85%, at least 86%, at least 87%, at least 88%, at least 89%, at least 90%, at least 91%, at least 92%, at least 93%, at least 94%, at least 95%, at least 96%, at least 97%, at least 98%, or at least 99% sequence identity to SEQ ID NO: 229. In some embodiments, the polypeptide having protease activity comprises an amino acid sequence having at least 50%, at least 60%, at least 70%, at least 80%, at least 81%, at least 82%, at least 83%, at least 84%, at least 85%, at least 86%, at least 87%, at least 88%, at least 89%, at least 90%, at least 91%, at least 92%, at least 93%, at least 94%, at least 95%, at least 96%, at least 97%, at least 98%, or at least 99% sequence identity to SEQ ID NO: 230. In some embodiments, the polypeptide having protease activity comprises an amino acid sequence having at least 50%, at least 60%, at least 70%, at least 80%, at least 81%, at least 82%, at least 83%, at least 84%, at least 85%, at least 86%, at least 87%, at least 88%, at least 89%, at least 90%, at least 91%, at least 92%, at least 93%, at least 94%, at least 95%, at least 96%, at least 97%, at least 98%, or at least 99% sequence identity to SEQ ID NO: 231. In some embodiments, the polypeptide having protease activity comprises an amino acid sequence having at least 50%, at least 60%, at least 70%, at least 80%, at least 81%, at least 82%, at least 83%, at least 84%, at least 85%, at least 86%, at least 87%, at least 88%, at least 89%, at least 90%, at least 91%, at least 92%, at least 93%, at least 94%, at least 95%, at least 96%, at least 97%, at least 98%, or at least 99% sequence identity to SEQ ID NO: 232. In some embodiments, the polypeptide having protease activity comprises an amino acid sequence having at least 50%, at least 60%, at least 70%, at least 80%, at least 81%, at least 82%, at least 83%, at least 84%, at least 85%, at least 86%, at least 87%, at least 88%, at least 89%, at least 90%, at least 91%, at least 92%, at least 93%, at least 94%, at least 95%, at least 96%, at least 97%, at least 98%, or at least 99% sequence identity to SEQ ID NO: 233. In some embodiments, the polypeptide having protease activity comprises an amino acid sequence having at least 50%, at least 60%, at least 70%, at least 80%, at least 81%, at least 82%, at least 83%, at least 84%, at least 85%, at least 86%, at least 87%, at least 88%, at least 89%, at least 90%, at least 91%, at least 92%, at least 93%, at least 94%, at least 95%, at least 96%, at least 97%, at least 98%, or at least 99% sequence identity to SEQ ID NO: 234. In some embodiments, the polypeptide having protease activity comprises an amino acid sequence having at least 50%, at least 60%, at least 70%, at least 80%, at least 81%, at least 82%, at least 83%, at least 84%, at least 85%, at least 86%, at least 87%, at least 88%, at least 89%, at least 90%, at least 91%, at least 92%, at least 93%, at least 94%, at least 95%, at least 96%, at least 97%, at least 98%, or at least 99% sequence identity to SEQ ID NO: 235. In some embodiments, the polypeptide having protease activity comprises an amino acid sequence having at least 50%, at least 60%, at least 70%, at least 80%, at least 81%, at least 82%, at least 83%, at least 84%, at least 85%, at least 86%, at least 87%, at least 88%, at least 89%, at least 90%, at least 91%, at least 92%, at least 93%, at least 94%, at least 95%, at least 96%, at least 97%, at least 98%, or at least 99% sequence identity to SEQ ID NO: 236. In some embodiments, the polypeptide having protease activity comprises an amino acid sequence having at least 50%, at least 60%, at least 70%, at least 80%, at least 81%, at least 82%, at least 83%, at least 84%, at least 85%, at least 86%, at least 87%, at least 88%, at least 89%, at least 90%, at least 91%, at least 92%, at least 93%, at least 94%, at least 95%, at least 96%, at least 97%, at least 98%, or at least 99% sequence identity to SEQ ID NO: 237. In some embodiments, the polypeptide having protease activity comprises an amino acid sequence having at least 50%, at least 60%, at least 70%, at least 80%, at least 81%, at least 82%, at least 83%, at least 84%, at least 85%, at least 86%, at least 87%, at least 88%, at least 89%, at least 90%, at least 91%, at least 92%, at least 93%, at least 94%, at least 95%, at least 96%, at least 97%, at least 98%, or at least 99% sequence identity to SEQ ID NO: 238. In some embodiments, the polypeptide having protease activity comprises an amino acid sequence having at least 50%, at least 60%, at least 70%, at least 80%, at least 81%, at least 82%, at least 83%, at least 84%, at least 85%, at least 86%, at least 87%, at least 88%, at least 89%, at least 90%, at least 91%, at least 92%, at least 93%, at least 94%, at least 95%, at least 96%, at least 97%, at least 98%, or at least 99% sequence identity to SEQ ID NO: 239. In some embodiments, the polypeptide having protease activity comprises an amino acid sequence having at least 50%, at least 60%, at least 70%, at least 80%, at least 81%, at least 82%, at least 83%, at least 84%, at least 85%, at least 86%, at least 87%, at least 88%, at least 89%, at least 90%, at least 91%, at least 92%, at least 93%, at least 94%, at least 95%, at least 96%, at least 97%, at least 98%, or at least 99% sequence identity to SEQ ID NO: 240. In some embodiments, the polypeptide having protease activity comprises an amino acid sequence having at least 50%, at least 60%, at least 70%, at least 80%, at least 81%, at least 82%, at least 83%, at least 84%, at least 85%, at least 86%, at least 87%, at least 88%, at least 89%, at least 90%, at least 91%, at least 92%, at least 93%, at least 94%, at least 95%, at least 96%, at least 97%, at least 98%, or at least 99% sequence identity to SEQ ID NO: 241. In some embodiments, the polypeptide having protease activity comprises an amino acid sequence having at least 50%, at least 60%, at least 70%, at least 80%, at least 81%, at least 82%, at least 83%, at least 84%, at least 85%, at least 86%, at least 87%, at least 88%, at least 89%, at least 90%, at least 91%, at least 92%, at least 93%, at least 94%, at least 95%, at least 96%, at least 97%, at least 98%, or at least 99% sequence identity to SEQ ID NO: 242. In some embodiments, the polypeptide having protease activity comprises an amino acid sequence having at least 50%, at least 60%, at least 70%, at least 80%, at least 81%, at least 82%, at least 83%, at least 84%, at least 85%, at least 86%, at least 87%, at least 88%, at least 89%, at least 90%, at least 91%, at least 92%, at least 93%, at least 94%, at least 95%, at least 96%, at least 97%, at least 98%, or at least 99% sequence identity to SEQ ID NO: 243. In some embodiments, the polypeptide having protease activity comprises an amino acid sequence having at least 50%, at least 60%, at least 70%, at least 80%, at least 81%, at least 82%, at least 83%, at least 84%, at least 85%, at least 86%, at least 87%, at least 88%, at least 89%, at least 90%, at least 91%, at least 92%, at least 93%, at least 94%, at least 95%, at least 96%, at least 97%, at least 98%, or at least 99% sequence identity to SEQ ID NO: 247. In some embodiments, the polypeptide having protease activity comprises an amino acid sequence having at least 50%, at least 60%, at least 70%, at least 80%, at least 81%, at least 82%, at least 83%, at least 84%, at least 85%, at least 86%, at least 87%, at least 88%, at least 89%, at least 90%, at least 91%, at least 92%, at least 93%, at least 94%, at least 95%, at least 96%, at least 97%, at least 98%, or at least 99% sequence identity to SEQ ID NO: 251. In some embodiments, the polypeptide having protease activity comprises an amino acid sequence having at least 50%, at least 60%, at least 70%, at least 80%, at least 81%, at least 82%, at least 83%, at least 84%, at least 85%, at least 86%, at least 87%, at least 88%, at least 89%, at least 90%, at least 91%, at least 92%, at least 93%, at least 94%, at least 95%, at least 96%, at least 97%, at least 98%, or at least 99% sequence identity to SEQ ID NO: 280. In some embodiments, the polypeptide having protease activity comprises an amino acid sequence having at least 50%, at least 60%, at least 70%, at least 80%, at least 81%, at least 82%, at least 83%, at least 84%, at least 85%, at least 86%, at least 87%, at least 88%, at least 89%, at least 90%, at least 91%, at least 92%, at least 93%, at least 94%, at least 95%, at least 96%, at least 97%, at least 98%, or at least 99% sequence identity to SEQ ID NO: 281. In some embodiments, the polypeptide having protease activity comprises an amino acid sequence having at least 50%, at least 60%, at least 70%, at least 80%, at least 81%, at least 82%, at least 83%, at least 84%, at least 85%, at least 86%, at least 87%, at least 88%, at least 89%, at least 90%, at least 91%, at least 92%, at least 93%, at least 94%, at least 95%, at least 96%, at least 97%, at least 98%, or at least 99% sequence identity to SEQ ID NO: 282. In some embodiments, the polypeptide having protease activity comprises an amino acid sequence having at least 50%, at least 60%, at least 70%, at least 80%, at least 81%, at least 82%, at least 83%, at least 84%, at least 85%, at least 86%, at least 87%, at least 88%, at least 89%, at least 90%, at least 91%, at least 92%, at least 93%, at least 94%, at least 95%, at least 96%, at least 97%, at least 98%, or at least 99% sequence identity to SEQ ID NO: 283. In some embodiments, the polypeptide having protease activity comprises an amino acid sequence having at least 50%, at least 60%, at least 70%, at least 80%, at least 81%, at least 82%, at least 83%, at least 84%, at least 85%, at least 86%, at least 87%, at least 88%, at least 89%, at least 90%, at least 91%, at least 92%, at least 93%, at least 94%, at least 95%, at least 96%, at least 97%, at least 98%, or at least 99% sequence identity to SEQ ID NO: 284. In some embodiments, the polypeptide having protease activity comprises an amino acid sequence having at least 50%, at least 60%, at least 70%, at least 80%, at least 81%, at least 82%, at least 83%, at least 84%, at least 85%, at least 86%, at least 87%, at least 88%, at least 89%, at least 90%, at least 91%, at least 92%, at least 93%, at least 94%, at least 95%, at least 96%, at least 97%, at least 98%, or at least 99% sequence identity to SEQ ID NO: 285. In some embodiments, the polypeptide having protease activity comprises an amino acid sequence having at least 50%, at least 60%, at least 70%, at least 80%, at least 81%, at least 82%, at least 83%, at least 84%, at least 85%, at least 86%, at least 87%, at least 88%, at least 89%, at least 90%, at least 91%, at least 92%, at least 93%, at least 94%, at least 95%, at least 96%, at least 97%, at least 98%, or at least 99% sequence identity to SEQ ID NO: 286. In some embodiments, the polypeptide having protease activity comprises an amino acid sequence having at least 50%, at least 60%, at least 70%, at least 80%, at least 81%, at least 82%, at least 83%, at least 84%, at least 85%, at least 86%, at least 87%, at least 88%, at least 89%, at least 90%, at least 91%, at least 92%, at least 93%, at least 94%, at least 95%, at least 96%, at least 97%, at least 98%, or at least 99% sequence identity to SEQ ID NO: 287. In some embodiments, the polypeptide having protease activity comprises an amino acid sequence having at least 50%, at least 60%, at least 70%, at least 80%, at least 81%, at least 82%, at least 83%, at least 84%, at least 85%, at least 86%, at least 87%, at least 88%, at least 89%, at least 90%, at least 91%, at least 92%, at least 93%, at least 94%, at least 95%, at least 96%, at least 97%, at least 98%, or at least 99% sequence identity to SEQ ID NO: 288. In some embodiments, the polypeptide having protease activity comprises an amino acid sequence having at least 50%, at least 60%, at least 70%, at least 80%, at least 81%, at least 82%, at least 83%, at least 84%, at least 85%, at least 86%, at least 87%, at least 88%, at least 89%, at least 90%, at least 91%, at least 92%, at least 93%, at least 94%, at least 95%, at least 96%, at least 97%, at least 98%, or at least 99% sequence identity to SEQ ID NO: 289. In some embodiments, the polypeptide having protease activity comprises an amino acid sequence having at least 50%, at least 60%, at least 70%, at least 80%, at least 81%, at least 82%, at least 83%, at least 84%, at least 85%, at least 86%, at least 87%, at least 88%, at least 89%, at least 90%, at least 91%, at least 92%, at least 93%, at least 94%, at least 95%, at least 96%, at least 97%, at least 98%, or at least 99% sequence identity to SEQ ID NO: 290. In some embodiments, the polypeptide having protease activity comprises an amino acid sequence having at least 50%, at least 60%, at least 70%, at least 80%, at least 81%, at least 82%, at least 83%, at least 84%, at least 85%, at least 86%, at least 87%, at least 88%, at least 89%, at least 90%, at least 91%, at least 92%, at least 93%, at least 94%, at least 95%, at least 96%, at least 97%, at least 98%, or at least 99% sequence identity to SEQ ID NO: 291. In some embodiments, the polypeptide having protease activity comprises an amino acid sequence having at least 50%, at least 60%, at least 70%, at least 80%, at least 81%, at least 82%, at least 83%, at least 84%, at least 85%, at least 86%, at least 87%, at least 88%, at least 89%, at least 90%, at least 91%, at least 92%, at least 93%, at least 94%, at least 95%, at least 96%, at least 97%, at least 98%, or at least 99% sequence identity to SEQ ID NO: 292. In some embodiments, the polypeptide having protease activity comprises an amino acid sequence having at least 50%, at least 60%, at least 70%, at least 80%, at least 81%, at least 82%, at least 83%, at least 84%, at least 85%, at least 86%, at least 87%, at least 88%, at least 89%, at least 90%, at least 91%, at least 92%, at least 93%, at least 94%, at least 95%, at least 96%, at least 97%, at least 98%, or at least 99% sequence identity to SEQ ID NO: 293. In some embodiments, the polypeptide having protease activity comprises an amino acid sequence having at least 50%, at least 60%, at least 70%, at least 80%, at least 81%, at least 82%, at least 83%, at least 84%, at least 85%, at least 86%, at least 87%, at least 88%, at least 89%, at least 90%, at least 91%, at least 92%, at least 93%, at least 94%, at least 95%, at least 96%, at least 97%, at least 98%, or at least 99% sequence identity to SEQ ID NO: 294. In some embodiments, the polypeptide having protease activity comprises an amino acid sequence having at least 50%, at least 60%, at least 70%, at least 80%, at least 81%, at least 82%, at least 83%, at least 84%, at least 85%, at least 86%, at least 87%, at least 88%, at least 89%, at least 90%, at least 91%, at least 92%, at least 93%, at least 94%, at least 95%, at least 96%, at least 97%, at least 98%, or at least 99% sequence identity to SEQ ID NO: 295. In some embodiments, the polypeptide having protease activity comprises an amino acid sequence having at least 50%, at least 60%, at least 70%, at least 80%, at least 81%, at least 82%, at least 83%, at least 84%, at least 85%, at least 86%, at least 87%, at least 88%, at least 89%, at least 90%, at least 91%, at least 92%, at least 93%, at least 94%, at least 95%, at least 96%, at least 97%, at least 98%, or at least 99% sequence identity to SEQ ID NO: 296. In some embodiments, the polypeptide having protease activity comprises an amino acid sequence having at least 50%, at least 60%, at least 70%, at least 80%, at least 81%, at least 82%, at least 83%, at least 84%, at least 85%, at least 86%, at least 87%, at least 88%, at least 89%, at least 90%, at least 91%, at least 92%, at least 93%, at least 94%, at least 95%, at least 96%, at least 97%, at least 98%, or at least 99% sequence identity to SEQ ID NO: 297. In some embodiments, the polypeptide having protease activity comprises an amino acid sequence having at least 50%, at least 60%, at least 70%, at least 80%, at least 81%, at least 82%, at least 83%, at least 84%, at least 85%, at least 86%, at least 87%, at least 88%, at least 89%, at least 90%, at least 91%, at least 92%, at least 93%, at least 94%, at least 95%, at least 96%, at least 97%, at least 98%, or at least 99% sequence identity to SEQ ID NO: 298. In some embodiments, the polypeptide having protease activity comprises an amino acid sequence having at least 50%, at least 60%, at least 70%, at least 80%, at least 81%, at least 82%, at least 83%, at least 84%, at least 85%, at least 86%, at least 87%, at least 88%, at least 89%, at least 90%, at least 91%, at least 92%, at least 93%, at least 94%, at least 95%, at least 96%, at least 97%, at least 98%, or at least 99% sequence identity to SEQ ID NO: 299. In some embodiments, the polypeptide having protease activity comprises an amino acid sequence having at least 50%, at least 60%, at least 70%, at least 80%, at least 81%, at least 82%, at least 83%, at least 84%, at least 85%, at least 86%, at least 87%, at least 88%, at least 89%, at least 90%, at least 91%, at least 92%, at least 93%, at least 94%, at least 95%, at least 96%, at least 97%, at least 98%, or at least 99% sequence identity to SEQ ID NO: 300. In some embodiments, the polypeptide having protease activity comprises an amino acid sequence having at least 50%, at least 60%, at least 70%, at least 80%, at least 81%, at least 82%, at least 83%, at least 84%, at least 85%, at least 86%, at least 87%, at least 88%, at least 89%, at least 90%, at least 91%, at least 92%, at least 93%, at least 94%, at least 95%, at least 96%, at least 97%, at least 98%, or at least 99% sequence identity to SEQ ID NO: 301. In some embodiments, the polypeptide having protease activity comprises an amino acid sequence having at least 50%, at least 60%, at least 70%, at least 80%, at least 81%, at least 82%, at least 83%, at least 84%, at least 85%, at least 86%, at least 87%, at least 88%, at least 89%, at least 90%, at least 91%, at least 92%, at least 93%, at least 94%, at least 95%, at least 96%, at least 97%, at least 98%, or at least 99% sequence identity to SEQ ID NO: 302. In some embodiments, the polypeptide having protease activity comprises an amino acid sequence having at least 50%, at least 60%, at least 70%, at least 80%, at least 81%, at least 82%, at least 83%, at least 84%, at least 85%, at least 86%, at least 87%, at least 88%, at least 89%, at least 90%, at least 91%, at least 92%, at least 93%, at least 94%, at least 95%, at least 96%, at least 97%, at least 98%, or at least 99% sequence identity to SEQ ID NO: 303. In some embodiments, the polypeptide having protease activity comprises an amino acid sequence having at least 50%, at least 60%, at least 70%, at least 80%, at least 81%, at least 82%, at least 83%, at least 84%, at least 85%, at least 86%, at least 87%, at least 88%, at least 89%, at least 90%, at least 91%, at least 92%, at least 93%, at least 94%, at least 95%, at least 96%, at least 97%, at least 98%, or at least 99% sequence identity to SEQ ID NO: 304. In some embodiments, the polypeptide having protease activity comprises an amino acid sequence having at least 50%, at least 60%, at least 70%, at least 80%, at least 81%, at least 82%, at least 83%, at least 84%, at least 85%, at least 86%, at least 87%, at least 88%, at least 89%, at least 90%, at least 91%, at least 92%, at least 93%, at least 94%, at least 95%, at least 96%, at least 97%, at least 98%, or at least 99% sequence identity to SEQ ID NO: 305. In some embodiments, the polypeptide having protease activity comprises an amino acid sequence having at least 50%, at least 60%, at least 70%, at least 80%, at least 81%, at least 82%, at least 83%, at least 84%, at least 85%, at least 86%, at least 87%, at least 88%, at least 89%, at least 90%, at least 91%, at least 92%, at least 93%, at least 94%, at least 95%, at least 96%, at least 97%, at least 98%, or at least 99% sequence identity to SEQ ID NO: 306. In some embodiments, the polypeptide having protease activity comprises an amino acid sequence having at least 50%, at least 60%, at least 70%, at least 80%, at least 81%, at least 82%, at least 83%, at least 84%, at least 85%, at least 86%, at least 87%, at least 88%, at least 89%, at least 90%, at least 91%, at least 92%, at least 93%, at least 94%, at least 95%, at least 96%, at least 97%, at least 98%, or at least 99% sequence identity to SEQ ID NO: 307. In some embodiments, the polypeptide having protease activity comprises an amino acid sequence having at least 50%, at least 60%, at least 70%, at least 80%, at least 81%, at least 82%, at least 83%, at least 84%, at least 85%, at least 86%, at least 87%, at least 88%, at least 89%, at least 90%, at least 91%, at least 92%, at least 93%, at least 94%, at least 95%, at least 96%, at least 97%, at least 98%, or at least 99% sequence identity to SEQ ID NO: 308. In some embodiments, the polypeptide having protease activity comprises an amino acid sequence having at least 50%, at least 60%, at least 70%, at least 80%, at least 81%, at least 82%, at least 83%, at least 84%, at least 85%, at least 86%, at least 87%, at least 88%, at least 89%, at least 90%, at least 91%, at least 92%, at least 93%, at least 94%, at least 95%, at least 96%, at least 97%, at least 98%, or at least 99% sequence identity to SEQ ID NO: 309. In some embodiments, the polypeptide having protease activity comprises an amino acid sequence having at least 50%, at least 60%, at least 70%, at least 80%, at least 81%, at least 82%, at least 83%, at least 84%, at least 85%, at least 86%, at least 87%, at least 88%, at least 89%, at least 90%, at least 91%, at least 92%, at least 93%, at least 94%, at least 95%, at least 96%, at least 97%, at least 98%, or at least 99% sequence identity to SEQ ID NO: 310. In some embodiments, the polypeptide having protease activity comprises an amino acid sequence having at least 50%, at least 60%, at least 70%, at least 80%, at least 81%, at least 82%, at least 83%, at least 84%, at least 85%, at least 86%, at least 87%, at least 88%, at least 89%, at least 90%, at least 91%, at least 92%, at least 93%, at least 94%, at least 95%, at least 96%, at least 97%, at least 98%, or at least 99% sequence identity to SEQ ID NO: 311. In some embodiments, the polypeptide having protease activity comprises an amino acid sequence having at least 50%, at least 60%, at least 70%, at least 80%, at least 81%, at least 82%, at least 83%, at least 84%, at least 85%, at least 86%, at least 87%, at least 88%, at least 89%, at least 90%, at least 91%, at least 92%, at least 93%, at least 94%, at least 95%, at least 96%, at least 97%, at least 98%, or at least 99% sequence identity to SEQ ID NO: 312. In some embodiments, the polypeptide having protease activity comprises an amino acid sequence having at least 50%, at least 60%, at least 70%, at least 80%, at least 81%, at least 82%, at least 83%, at least 84%, at least 85%, at least 86%, at least 87%, at least 88%, at least 89%, at least 90%, at least 91%, at least 92%, at least 93%, at least 94%, at least 95%, at least 96%, at least 97%, at least 98%, or at least 99% sequence identity to SEQ ID NO: 313. In some embodiments, the polypeptide having protease activity comprises an amino acid sequence having at least 50%, at least 60%, at least 70%, at least 80%, at least 81%, at least 82%, at least 83%, at least 84%, at least 85%, at least 86%, at least 87%, at least 88%, at least 89%, at least 90%, at least 91%, at least 92%, at least 93%, at least 94%, at least 95%, at least 96%, at least 97%, at least 98%, or at least 99% sequence identity to SEQ ID NO: 314. In some embodiments, the polypeptide having protease activity comprises an amino acid sequence having at least 50%, at least 60%, at least 70%, at least 80%, at least 81%, at least 82%, at least 83%, at least 84%, at least 85%, at least 86%, at least 87%, at least 88%, at least 89%, at least 90%, at least 91%, at least 92%, at least 93%, at least 94%, at least 95%, at least 96%, at least 97%, at least 98%, or at least 99% sequence identity to SEQ ID NO: 315. In some embodiments, the polypeptide having protease activity comprises an amino acid sequence having at least 50%, at least 60%, at least 70%, at least 80%, at least 81%, at least 82%, at least 83%, at least 84%, at least 85%, at least 86%, at least 87%, at least 88%, at least 89%, at least 90%, at least 91%, at least 92%, at least 93%, at least 94%, at least 95%, at least 96%, at least 97%, at least 98%, or at least 99% sequence identity to SEQ ID NO: 316. In some embodiments, the polypeptide having protease activity comprises an amino acid sequence having at least 50%, at least 60%, at least 70%, at least 80%, at least 81%, at least 82%, at least 83%, at least 84%, at least 85%, at least 86%, at least 87%, at least 88%, at least 89%, at least 90%, at least 91%, at least 92%, at least 93%, at least 94%, at least 95%, at least 96%, at least 97%, at least 98%, or at least 99% sequence identity to SEQ ID NO: 317. In some embodiments, the polypeptide having protease activity comprises an amino acid sequence having at least 50%, at least 60%, at least 70%, at least 80%, at least 81%, at least 82%, at least 83%, at least 84%, at least 85%, at least 86%, at least 87%, at least 88%, at least 89%, at least 90%, at least 91%, at least 92%, at least 93%, at least 94%, at least 95%, at least 96%, at least 97%, at least 98%, or at least 99% sequence identity to SEQ ID NO: 318. In some embodiments, the polypeptide having protease activity comprises an amino acid sequence having at least 50%, at least 60%, at least 70%, at least 80%, at least 81%, at least 82%, at least 83%, at least 84%, at least 85%, at least 86%, at least 87%, at least 88%, at least 89%, at least 90%, at least 91%, at least 92%, at least 93%, at least 94%, at least 95%, at least 96%, at least 97%, at least 98%, or at least 99% sequence identity to SEQ ID NO: 319. In some embodiments, the polypeptide having protease activity comprises an amino acid sequence having at least 50%, at least 60%, at least 70%, at least 80%, at least 81%, at least 82%, at least 83%, at least 84%, at least 85%, at least 86%, at least 87%, at least 88%, at least 89%, at least 90%, at least 91%, at least 92%, at least 93%, at least 94%, at least 95%, at least 96%, at least 97%, at least 98%, or at least 99% sequence identity to SEQ ID NO: 320. In some embodiments, the polypeptide having protease activity comprises an amino acid sequence having at least 50%, at least 60%, at least 70%, at least 80%, at least 81%, at least 82%, at least 83%, at least 84%, at least 85%, at least 86%, at least 87%, at least 88%, at least 89%, at least 90%, at least 91%, at least 92%, at least 93%, at least 94%, at least 95%, at least 96%, at least 97%, at least 98%, or at least 99% sequence identity to SEQ ID NO: 321. In some embodiments, the polypeptide having protease activity comprises an amino acid sequence having at least 50%, at least 60%, at least 70%, at least 80%, at least 81%, at least 82%, at least 83%, at least 84%, at least 85%, at least 86%, at least 87%, at least 88%, at least 89%, at least 90%, at least 91%, at least 92%, at least 93%, at least 94%, at least 95%, at least 96%, at least 97%, at least 98%, or at least 99% sequence identity to SEQ ID NO: 322. In some embodiments, the polypeptide having protease activity comprises an amino acid sequence having at least 50%, at least 60%, at least 70%, at least 80%, at least 81%, at least 82%, at least 83%, at least 84%, at least 85%, at least 86%, at least 87%, at least 88%, at least 89%, at least 90%, at least 91%, at least 92%, at least 93%, at least 94%, at least 95%, at least 96%, at least 97%, at least 98%, or at least 99% sequence identity to SEQ ID NO: 323. In some embodiments, the polypeptide having protease activity comprises an amino acid sequence having at least 50%, at least 60%, at least 70%, at least 80%, at least 81%, at least 82%, at least 83%, at least 84%, at least 85%, at least 86%, at least 87%, at least 88%, at least 89%, at least 90%, at least 91%, at least 92%, at least 93%, at least 94%, at least 95%, at least 96%, at least 97%, at least 98%, or at least 99% sequence identity to SEQ ID NO: 324. In some embodiments, the polypeptide having protease activity comprises an amino acid sequence having at least 50%, at least 60%, at least 70%, at least 80%, at least 81%, at least 82%, at least 83%, at least 84%, at least 85%, at least 86%, at least 87%, at least 88%, at least 89%, at least 90%, at least 91%, at least 92%, at least 93%, at least 94%, at least 95%, at least 96%, at least 97%, at least 98%, or at least 99% sequence identity to SEQ ID NO: 325. In some embodiments, the polypeptide having protease activity comprises an amino acid sequence having at least 50%, at least 60%, at least 70%, at least 80%, at least 81%, at least 82%, at least 83%, at least 84%, at least 85%, at least 86%, at least 87%, at least 88%, at least 89%, at least 90%, at least 91%, at least 92%, at least 93%, at least 94%, at least 95%, at least 96%, at least 97%, at least 98%, or at least 99% sequence identity to SEQ ID NO: 326. In some embodiments, the polypeptide having protease activity comprises an amino acid sequence having at least 50%, at least 60%, at least 70%, at least 80%, at least 81%, at least 82%, at least 83%, at least 84%, at least 85%, at least 86%, at least 87%, at least 88%, at least 89%, at least 90%, at least 91%, at least 92%, at least 93%, at least 94%, at least 95%, at least 96%, at least 97%, at least 98%, or at least 99% sequence identity to SEQ ID NO: 327. In some embodiments, the polypeptide having protease activity comprises an amino acid sequence having at least 50%, at least 60%, at least 70%, at least 80%, at least 81%, at least 82%, at least 83%, at least 84%, at least 85%, at least 86%, at least 87%, at least 88%, at least 89%, at least 90%, at least 91%, at least 92%, at least 93%, at least 94%, at least 95%, at least 96%, at least 97%, at least 98%, or at least 99% sequence identity to SEQ ID NO: 328. In some embodiments, the polypeptide having protease activity comprises an amino acid sequence having at least 50%, at least 60%, at least 70%, at least 80%, at least 81%, at least 82%, at least 83%, at least 84%, at least 85%, at least 86%, at least 87%, at least 88%, at least 89%, at least 90%, at least 91%, at least 92%, at least 93%, at least 94%, at least 95%, at least 96%, at least 97%, at least 98%, or at least 99% sequence identity to SEQ ID NO: 329. In some embodiments, the polypeptide having protease activity comprises an amino acid sequence having at least 50%, at least 60%, at least 70%, at least 80%, at least 81%, at least 82%, at least 83%, at least 84%, at least 85%, at least 86%, at least 87%, at least 88%, at least 89%, at least 90%, at least 91%, at least 92%, at least 93%, at least 94%, at least 95%, at least 96%, at least 97%, at least 98%, or at least 99% sequence identity to SEQ ID NO: 330. In some embodiments, the polypeptide having protease activity comprises an amino acid sequence having at least 50%, at least 60%, at least 70%, at least 80%, at least 81%, at least 82%, at least 83%, at least 84%, at least 85%, at least 86%, at least 87%, at least 88%, at least 89%, at least 90%, at least 91%, at least 92%, at least 93%, at least 94%, at least 95%, at least 96%, at least 97%, at least 98%, or at least 99% sequence identity to SEQ ID NO: 331. In some embodiments, the polypeptide having protease activity comprises an amino acid sequence having at least 50%, at least 60%, at least 70%, at least 80%, at least 81%, at least 82%, at least 83%, at least 84%, at least 85%, at least 86%, at least 87%, at least 88%, at least 89%, at least 90%, at least 91%, at least 92%, at least 93%, at least 94%, at least 95%, at least 96%, at least 97%, at least 98%, or at least 99% sequence identity to SEQ ID NO: 332. In some embodiments, the polypeptide having protease activity comprises an amino acid sequence having at least 50%, at least 60%, at least 70%, at least 80%, at least 81%, at least 82%, at least 83%, at least 84%, at least 85%, at least 86%, at least 87%, at least 88%, at least 89%, at least 90%, at least 91%, at least 92%, at least 93%, at least 94%, at least 95%, at least 96%, at least 97%, at least 98%, or at least 99% sequence identity to SEQ ID NO: 333. In some embodiments, the polypeptide having protease activity comprises an amino acid sequence having at least 50%, at least 60%, at least 70%, at least 80%, at least 81%, at least 82%, at least 83%, at least 84%, at least 85%, at least 86%, at least 87%, at least 88%, at least 89%, at least 90%, at least 91%, at least 92%, at least 93%, at least 94%, at least 95%, at least 96%, at least 97%, at least 98%, or at least 99% sequence identity to SEQ ID NO: 334. In some embodiments, the polypeptide having protease activity comprises an amino acid sequence having at least 50%, at least 60%, at least 70%, at least 80%, at least 81%, at least 82%, at least 83%, at least 84%, at least 85%, at least 86%, at least 87%, at least 88%, at least 89%, at least 90%, at least 91%, at least 92%, at least 93%, at least 94%, at least 95%, at least 96%, at least 97%, at least 98%, or at least 99% sequence identity to SEQ ID NO: 335. In some embodiments, the polypeptide having protease activity comprises an amino acid sequence having at least 50%, at least 60%, at least 70%, at least 80%, at least 81%, at least 82%, at least 83%, at least 84%, at least 85%, at least 86%, at least 87%, at least 88%, at least 89%, at least 90%, at least 91%, at least 92%, at least 93%, at least 94%, at least 95%, at least 96%, at least 97%, at least 98%, or at least 99% sequence identity to SEQ ID NO: 336. In some embodiments, the polypeptide having protease activity comprises an amino acid sequence having at least 50%, at least 60%, at least 70%, at least 80%, at least 81%, at least 82%, at least 83%, at least 84%, at least 85%, at least 86%, at least 87%, at least 88%, at least 89%, at least 90%, at least 91%, at least 92%, at least 93%, at least 94%, at least 95%, at least 96%, at least 97%, at least 98%, or at least 99% sequence identity to SEQ ID NO: 337. In some embodiments, the polypeptide having protease activity comprises an amino acid sequence having at least 50%, at least 60%, at least 70%, at least 80%, at least 81%, at least 82%, at least 83%, at least 84%, at least 85%, at least 86%, at least 87%, at least 88%, at least 89%, at least 90%, at least 91%, at least 92%, at least 93%, at least 94%, at least 95%, at least 96%, at least 97%, at least 98%, or at least 99% sequence identity to SEQ ID NO: 338. In some embodiments, the polypeptide having protease activity comprises an amino acid sequence having at least 50%, at least 60%, at least 70%, at least 80%, at least 81%, at least 82%, at least 83%, at least 84%, at least 85%, at least 86%, at least 87%, at least 88%, at least 89%, at least 90%, at least 91%, at least 92%, at least 93%, at least 94%, at least 95%, at least 96%, at least 97%, at least 98%, or at least 99% sequence identity to SEQ ID NO: 339. In some embodiments, the polypeptide having protease activity comprises an amino acid sequence having at least 50%, at least 60%, at least 70%, at least 80%, at least 81%, at least 82%, at least 83%, at least 84%, at least 85%, at least 86%, at least 87%, at least 88%, at least 89%, at least 90%, at least 91%, at least 92%, at least 93%, at least 94%, at least 95%, at least 96%, at least 97%, at least 98%, or at least 99% sequence identity to SEQ ID NO: 340. In some embodiments, the polypeptide having protease activity comprises an amino acid sequence having at least 50%, at least 60%, at least 70%, at least 80%, at least 81%, at least 82%, at least 83%, at least 84%, at least 85%, at least 86%, at least 87%, at least 88%, at least 89%, at least 90%, at least 91%, at least 92%, at least 93%, at least 94%, at least 95%, at least 96%, at least 97%, at least 98%, or at least 99% sequence identity to SEQ ID NO: 341. In some embodiments, the polypeptide having protease activity comprises an amino acid sequence having at least 50%, at least 60%, at least 70%, at least 80%, at least 81%, at least 82%, at least 83%, at least 84%, at least 85%, at least 86%, at least 87%, at least 88%, at least 89%, at least 90%, at least 91%, at least 92%, at least 93%, at least 94%, at least 95%, at least 96%, at least 97%, at least 98%, or at least 99% sequence identity to SEQ ID NO: 342. In some embodiments, the polypeptide having protease activity comprises an amino acid sequence having at least 50%, at least 60%, at least 70%, at least 80%, at least 81%, at least 82%, at least 83%, at least 84%, at least 85%, at least 86%, at least 87%, at least 88%, at least 89%, at least 90%, at least 91%, at least 92%, at least 93%, at least 94%, at least 95%, at least 96%, at least 97%, at least 98%, or at least 99% sequence identity to SEQ ID NO: 343. In some embodiments, the polypeptide having protease activity comprises an amino acid sequence having at least 50%, at least 60%, at least 70%, at least 80%, at least 81%, at least 82%, at least 83%, at least 84%, at least 85%, at least 86%, at least 87%, at least 88%, at least 89%, at least 90%, at least 91%, at least 92%, at least 93%, at least 94%, at least 95%, at least 96%, at least 97%, at least 98%, or at least 99% sequence identity to SEQ ID NO: 344. In some embodiments, the polypeptide having protease activity comprises an amino acid sequence having at least 50%, at least 60%, at least 70%, at least 80%, at least 81%, at least 82%, at least 83%, at least 84%, at least 85%, at least 86%, at least 87%, at least 88%, at least 89%, at least 90%, at least 91%, at least 92%, at least 93%, at least 94%, at least 95%, at least 96%, at least 97%, at least 98%, or at least 99% sequence identity to SEQ ID NO: 345. In some embodiments, the polypeptide having protease activity comprises an amino acid sequence having at least 50%, at least 60%, at least 70%, at least 80%, at least 81%, at least 82%, at least 83%, at least 84%, at least 85%, at least 86%, at least 87%, at least 88%, at least 89%, at least 90%, at least 91%, at least 92%, at least 93%, at least 94%, at least 95%, at least 96%, at least 97%, at least 98%, or at least 99% sequence identity to SEQ ID NO: 346. In some embodiments, the polypeptide having protease activity comprises an amino acid sequence having at least 50%, at least 60%, at least 70%, at least 80%, at least 81%, at least 82%, at least 83%, at least 84%, at least 85%, at least 86%, at least 87%, at least 88%, at least 89%, at least 90%, at least 91%, at least 92%, at least 93%, at least 94%, at least 95%, at least 96%, at least 97%, at least 98%, or at least 99% sequence identity to SEQ ID NO: 347. In some embodiments, the polypeptide having protease activity comprises an amino acid sequence having at least 50%, at least 60%, at least 70%, at least 80%, at least 81%, at least 82%, at least 83%, at least 84%, at least 85%, at least 86%, at least 87%, at least 88%, at least 89%, at least 90%, at least 91%, at least 92%, at least 93%, at least 94%, at least 95%, at least 96%, at least 97%, at least 98%, or at least 99% sequence identity to SEQ ID NO: 348. In some embodiments, the polypeptide having protease activity comprises an amino acid sequence having at least 50%, at least 60%, at least 70%, at least 80%, at least 81%, at least 82%, at least 83%, at least 84%, at least 85%, at least 86%, at least 87%, at least 88%, at least 89%, at least 90%, at least 91%, at least 92%, at least 93%, at least 94%, at least 95%, at least 96%, at least 97%, at least 98%, or at least 99% sequence identity to SEQ ID NO: 349. In some embodiments, the polypeptide having protease activity comprises an amino acid sequence having at least 50%, at least 60%, at least 70%, at least 80%, at least 81%, at least 82%, at least 83%, at least 84%, at least 85%, at least 86%, at least 87%, at least 88%, at least 89%, at least 90%, at least 91%, at least 92%, at least 93%, at least 94%, at least 95%, at least 96%, at least 97%, at least 98%, or at least 99% sequence identity to SEQ ID NO: 350. In some embodiments, the polypeptide having protease activity comprises an amino acid sequence having at least 50%, at least 60%, at least 70%, at least 80%, at least 81%, at least 82%, at least 83%, at least 84%, at least 85%, at least 86%, at least 87%, at least 88%, at least 89%, at least 90%, at least 91%, at least 92%, at least 93%, at least 94%, at least 95%, at least 96%, at least 97%, at least 98%, or at least 99% sequence identity to SEQ ID NO: 351. In some embodiments, the polypeptide having protease activity comprises an amino acid sequence having at least 50%, at least 60%, at least 70%, at least 80%, at least 81%, at least 82%, at least 83%, at least 84%, at least 85%, at least 86%, at least 87%, at least 88%, at least 89%, at least 90%, at least 91%, at least 92%, at least 93%, at least 94%, at least 95%, at least 96%, at least 97%, at least 98%, or at least 99% sequence identity to SEQ ID NO: 352. In some embodiments, the polypeptide having protease activity comprises an amino acid sequence having at least 50%, at least 60%, at least 70%, at least 80%, at least 81%, at least 82%, at least 83%, at least 84%, at least 85%, at least 86%, at least 87%, at least 88%, at least 89%, at least 90%, at least 91%, at least 92%, at least 93%, at least 94%, at least 95%, at least 96%, at least 97%, at least 98%, or at least 99% sequence identity to SEQ ID NO: 353. In some embodiments, the polypeptide having protease activity comprises an amino acid sequence having at least 50%, at least 60%, at least 70%, at least 80%, at least 81%, at least 82%, at least 83%, at least 84%, at least 85%, at least 86%, at least 87%, at least 88%, at least 89%, at least 90%, at least 91%, at least 92%, at least 93%, at least 94%, at least 95%, at least 96%, at least 97%, at least 98%, or at least 99% sequence identity to SEQ ID NO: 354. In some embodiments, the polypeptide having protease activity comprises an amino acid sequence having at least 50%, at least 60%, at least 70%, at least 80%, at least 81%, at least 82%, at least 83%, at least 84%, at least 85%, at least 86%, at least 87%, at least 88%, at least 89%, at least 90%, at least 91%, at least 92%, at least 93%, at least 94%, at least 95%, at least 96%, at least 97%, at least 98%, or at least 99% sequence identity to SEQ ID NO: 355. In some embodiments, the polypeptide having protease activity comprises an amino acid sequence having at least 50%, at least 60%, at least 70%, at least 80%, at least 81%, at least 82%, at least 83%, at least 84%, at least 85%, at least 86%, at least 87%, at least 88%, at least 89%, at least 90%, at least 91%, at least 92%, at least 93%, at least 94%, at least 95%, at least 96%, at least 97%, at least 98%, or at least 99% sequence identity to SEQ ID NO: 356. In some embodiments, the polypeptide having protease activity comprises an amino acid sequence having at least 50%, at least 60%, at least 70%, at least 80%, at least 81%, at least 82%, at least 83%, at least 84%, at least 85%, at least 86%, at least 87%, at least 88%, at least 89%, at least 90%, at least 91%, at least 92%, at least 93%, at least 94%, at least 95%, at least 96%, at least 97%, at least 98%, or at least 99% sequence identity to SEQ ID NO: 357. In some embodiments, the polypeptide having protease activity comprises an amino acid sequence having at least 50%, at least 60%, at least 70%, at least 80%, at least 81%, at least 82%, at least 83%, at least 84%, at least 85%, at least 86%, at least 87%, at least 88%, at least 89%, at least 90%, at least 91%, at least 92%, at least 93%, at least 94%, at least 95%, at least 96%, at least 97%, at least 98%, or at least 99% sequence identity to SEQ ID NO: 358. In some embodiments, the polypeptide having protease activity comprises an amino acid sequence having at least 50%, at least 60%, at least 70%, at least 80%, at least 81%, at least 82%, at least 83%, at least 84%, at least 85%, at least 86%, at least 87%, at least 88%, at least 89%, at least 90%, at least 91%, at least 92%, at least 93%, at least 94%, at least 95%, at least 96%, at least 97%, at least 98%, or at least 99% sequence identity to SEQ ID NO: 359. In some embodiments, the polypeptide having protease activity comprises an amino acid sequence having at least 50%, at least 60%, at least 70%, at least 80%, at least 81%, at least 82%, at least 83%, at least 84%, at least 85%, at least 86%, at least 87%, at least 88%, at least 89%, at least 90%, at least 91%, at least 92%, at least 93%, at least 94%, at least 95%, at least 96%, at least 97%, at least 98%, or at least 99% sequence identity to SEQ ID NO: 360. In some embodiments, the polypeptide having protease activity comprises an amino acid sequence having at least 50%, at least 60%, at least 70%, at least 80%, at least 81%, at least 82%, at least 83%, at least 84%, at least 85%, at least 86%, at least 87%, at least 88%, at least 89%, at least 90%, at least 91%, at least 92%, at least 93%, at least 94%, at least 95%, at least 96%, at least 97%, at least 98%, or at least 99% sequence identity to SEQ ID NO: 361. In some embodiments, the polypeptide having protease activity comprises an amino acid sequence having at least 50%, at least 60%, at least 70%, at least 80%, at least 81%, at least 82%, at least 83%, at least 84%, at least 85%, at least 86%, at least 87%, at least 88%, at least 89%, at least 90%, at least 91%, at least 92%, at least 93%, at least 94%, at least 95%, at least 96%, at least 97%, at least 98%, or at least 99% sequence identity to SEQ ID NO: 362. In some embodiments, the polypeptide having protease activity comprises an amino acid sequence having at least 50%, at least 60%, at least 70%, at least 80%, at least 81%, at least 82%, at least 83%, at least 84%, at least 85%, at least 86%, at least 87%, at least 88%, at least 89%, at least 90%, at least 91%, at least 92%, at least 93%, at least 94%, at least 95%, at least 96%, at least 97%, at least 98%, or at least 99% sequence identity to SEQ ID NO: 363. In some embodiments, the polypeptide having protease activity comprises an amino acid sequence having at least 50%, at least 60%, at least 70%, at least 80%, at least 81%, at least 82%, at least 83%, at least 84%, at least 85%, at least 86%, at least 87%, at least 88%, at least 89%, at least 90%, at least 91%, at least 92%, at least 93%, at least 94%, at least 95%, at least 96%, at least 97%, at least 98%, or at least 99% sequence identity to SEQ ID NO: 364. In some embodiments, the polypeptide having protease activity comprises an amino acid sequence having at least 50%, at least 60%, at least 70%, at least 80%, at least 81%, at least 82%, at least 83%, at least 84%, at least 85%, at least 86%, at least 87%, at least 88%, at least 89%, at least 90%, at least 91%, at least 92%, at least 93%, at least 94%, at least 95%, at least 96%, at least 97%, at least 98%, or at least 99% sequence identity to SEQ ID NO: 365. In some embodiments, the polypeptide having protease activity comprises an amino acid sequence having at least 50%, at least 60%, at least 70%, at least 80%, at least 81%, at least 82%, at least 83%, at least 84%, at least 85%, at least 86%, at least 87%, at least 88%, at least 89%, at least 90%, at least 91%, at least 92%, at least 93%, at least 94%, at least 95%, at least 96%, at least 97%, at least 98%, or at least 99% sequence identity to SEQ ID NO: 366. In some embodiments, the polypeptide having protease activity comprises an amino acid sequence having at least 50%, at least 60%, at least 70%, at least 80%, at least 81%, at least 82%, at least 83%, at least 84%, at least 85%, at least 86%, at least 87%, at least 88%, at least 89%, at least 90%, at least 91%, at least 92%, at least 93%, at least 94%, at least 95%, at least 96%, at least 97%, at least 98%, or at least 99% sequence identity to SEQ ID NO: 367. In some embodiments, the polypeptide having protease activity comprises an amino acid sequence having at least 50%, at least 60%, at least 70%, at least 80%, at least 81%, at least 82%, at least 83%, at least 84%, at least 85%, at least 86%, at least 87%, at least 88%, at least 89%, at least 90%, at least 91%, at least 92%, at least 93%, at least 94%, at least 95%, at least 96%, at least 97%, at least 98%, or at least 99% sequence identity to SEQ ID NO: 368. In some embodiments, the polypeptide having protease activity comprises an amino acid sequence having at least 50%, at least 60%, at least 70%, at least 80%, at least 81%, at least 82%, at least 83%, at least 84%, at least 85%, at least 86%, at least 87%, at least 88%, at least 89%, at least 90%, at least 91%, at least 92%, at least 93%, at least 94%, at least 95%, at least 96%, at least 97%, at least 98%, or at least 99% sequence identity to SEQ ID NO: 369. In some embodiments, the polypeptide having protease activity comprises an amino acid sequence having at least 50%, at least 60%, at least 70%, at least 80%, at least 81%, at least 82%, at least 83%, at least 84%, at least 85%, at least 86%, at least 87%, at least 88%, at least 89%, at least 90%, at least 91%, at least 92%, at least 93%, at least 94%, at least 95%, at least 96%, at least 97%, at least 98%, or at least 99% sequence identity to SEQ ID NO: 370. In some embodiments, the polypeptide having protease activity comprises an amino acid sequence having at least 50%, at least 60%, at least 70%, at least 80%, at least 81%, at least 82%, at least 83%, at least 84%, at least 85%, at least 86%, at least 87%, at least 88%, at least 89%, at least 90%, at least 91%, at least 92%, at least 93%, at least 94%, at least 95%, at least 96%, at least 97%, at least 98%, or at least 99% sequence identity to SEQ ID NO: 371. In some embodiments, the polypeptide having protease activity comprises an amino acid sequence having at least 50%, at least 60%, at least 70%, at least 80%, at least 81%, at least 82%, at least 83%, at least 84%, at least 85%, at least 86%, at least 87%, at least 88%, at least 89%, at least 90%, at least 91%, at least 92%, at least 93%, at least 94%, at least 95%, at least 96%, at least 97%, at least 98%, or at least 99% sequence identity to SEQ ID NO: 372. In some embodiments, the polypeptide having protease activity comprises an amino acid sequence having at least 50%, at least 60%, at least 70%, at least 80%, at least 81%, at least 82%, at least 83%, at least 84%, at least 85%, at least 86%, at least 87%, at least 88%, at least 89%, at least 90%, at least 91%, at least 92%, at least 93%, at least 94%, at least 95%, at least 96%, at least 97%, at least 98%, or at least 99% sequence identity to SEQ ID NO: 373. In some embodiments, the polypeptide having protease activity comprises an amino acid sequence having at least 50%, at least 60%, at least 70%, at least 80%, at least 81%, at least 82%, at least 83%, at least 84%, at least 85%, at least 86%, at least 87%, at least 88%, at least 89%, at least 90%, at least 91%, at least 92%, at least 93%, at least 94%, at least 95%, at least 96%, at least 97%, at least 98%, or at least 99% sequence identity to SEQ ID NO: 374. In some embodiments, the polypeptide having protease activity comprises an amino acid sequence having at least 50%, at least 60%, at least 70%, at least 80%, at least 81%, at least 82%, at least 83%, at least 84%, at least 85%, at least 86%, at least 87%, at least 88%, at least 89%, at least 90%, at least 91%, at least 92%, at least 93%, at least 94%, at least 95%, at least 96%, at least 97%, at least 98%, or at least 99% sequence identity to SEQ ID NO: 375. In some embodiments, the polypeptide having protease activity comprises an amino acid sequence having at least 50%, at least 60%, at least 70%, at least 80%, at least 81%, at least 82%, at least 83%, at least 84%, at least 85%, at least 86%, at least 87%, at least 88%, at least 89%, at least 90%, at least 91%, at least 92%, at least 93%, at least 94%, at least 95%, at least 96%, at least 97%, at least 98%, or at least 99% sequence identity to SEQ ID NO: 376. In some embodiments, the polypeptide having protease activity comprises an amino acid sequence having at least 50%, at least 60%, at least 70%, at least 80%, at least 81%, at least 82%, at least 83%, at least 84%, at least 85%, at least 86%, at least 87%, at least 88%, at least 89%, at least 90%, at least 91%, at least 92%, at least 93%, at least 94%, at least 95%, at least 96%, at least 97%, at least 98%, or at least 99% sequence identity to SEQ ID NO: 377. In some embodiments, the polypeptide having protease activity comprises an amino acid sequence having at least 50%, at least 60%, at least 70%, at least 80%, at least 81%, at least 82%, at least 83%, at least 84%, at least 85%, at least 86%, at least 87%, at least 88%, at least 89%, at least 90%, at least 91%, at least 92%, at least 93%, at least 94%, at least 95%, at least 96%, at least 97%, at least 98%, or at least 99% sequence identity to SEQ ID NO: 378. In some embodiments, the polypeptide having protease activity comprises an amino acid sequence having at least 50%, at least 60%, at least 70%, at least 80%, at least 81%, at least 82%, at least 83%, at least 84%, at least 85%, at least 86%, at least 87%, at least 88%, at least 89%, at least 90%, at least 91%, at least 92%, at least 93%, at least 94%, at least 95%, at least 96%, at least 97%, at least 98%, or at least 99% sequence identity to SEQ ID NO: 379. In some embodiments, the polypeptide having protease activity comprises an amino acid sequence having at least 50%, at least 60%, at least 70%, at least 80%, at least 81%, at least 82%, at least 83%, at least 84%, at least 85%, at least 86%, at least 87%, at least 88%, at least 89%, at least 90%, at least 91%, at least 92%, at least 93%, at least 94%, at least 95%, at least 96%, at least 97%, at least 98%, or at least 99% sequence identity to SEQ ID NO: 380. In some embodiments, the polypeptide having protease activity comprises an amino acid sequence having at least 50%, at least 60%, at least 70%, at least 80%, at least 81%, at least 82%, at least 83%, at least 84%, at least 85%, at least 86%, at least 87%, at least 88%, at least 89%, at least 90%, at least 91%, at least 92%, at least 93%, at least 94%, at least 95%, at least 96%, at least 97%, at least 98%, or at least 99% sequence identity to SEQ ID NO: 381. In some embodiments, the polypeptide having protease activity comprises an amino acid sequence having at least 50%, at least 60%, at least 70%, at least 80%, at least 81%, at least 82%, at least 83%, at least 84%, at least 85%, at least 86%, at least 87%, at least 88%, at least 89%, at least 90%, at least 91%, at least 92%, at least 93%, at least 94%, at least 95%, at least 96%, at least 97%, at least 98%, or at least 99% sequence identity to SEQ ID NO: 382. In some embodiments, the polypeptide having protease activity comprises an amino acid sequence having at least 50%, at least 60%, at least 70%, at least 80%, at least 81%, at least 82%, at least 83%, at least 84%, at least 85%, at least 86%, at least 87%, at least 88%, at least 89%, at least 90%, at least 91%, at least 92%, at least 93%, at least 94%, at least 95%, at least 96%, at least 97%, at least 98%, or at least 99% sequence identity to SEQ ID NO: 383. In some embodiments, the polypeptide having protease activity comprises an amino acid sequence having at least 50%, at least 60%, at least 70%, at least 80%, at least 81%, at least 82%, at least 83%, at least 84%, at least 85%, at least 86%, at least 87%, at least 88%, at least 89%, at least 90%, at least 91%, at least 92%, at least 93%, at least 94%, at least 95%, at least 96%, at least 97%, at least 98%, or at least 99% sequence identity to SEQ ID NO: 384. In some embodiments, the polypeptide having protease activity comprises an amino acid sequence having at least 50%, at least 60%, at least 70%, at least 80%, at least 81%, at least 82%, at least 83%, at least 84%, at least 85%, at least 86%, at least 87%, at least 88%, at least 89%, at least 90%, at least 91%, at least 92%, at least 93%, at least 94%, at least 95%, at least 96%, at least 97%, at least 98%, or at least 99% sequence identity to SEQ ID NO: 385. In some embodiments, the polypeptide having protease activity comprises an amino acid sequence having at least 50%, at least 60%, at least 70%, at least 80%, at least 81%, at least 82%, at least 83%, at least 84%, at least 85%, at least 86%, at least 87%, at least 88%, at least 89%, at least 90%, at least 91%, at least 92%, at least 93%, at least 94%, at least 95%, at least 96%, at least 97%, at least 98%, or at least 99% sequence identity to SEQ ID NO: 386. In some embodiments, the polypeptide having protease activity comprises an amino acid sequence having at least 50%, at least 60%, at least 70%, at least 80%, at least 81%, at least 82%, at least 83%, at least 84%, at least 85%, at least 86%, at least 87%, at least 88%, at least 89%, at least 90%, at least 91%, at least 92%, at least 93%, at least 94%, at least 95%, at least 96%, at least 97%, at least 98%, or at least 99% sequence identity to SEQ ID NO: 387. In some embodiments, the polypeptide having protease activity comprises an amino acid sequence having at least 50%, at least 60%, at least 70%, at least 80%, at least 81%, at least 82%, at least 83%, at least 84%, at least 85%, at least 86%, at least 87%, at least 88%, at least 89%, at least 90%, at least 91%, at least 92%, at least 93%, at least 94%, at least 95%, at least 96%, at least 97%, at least 98%, or at least 99% sequence identity to SEQ ID NO: 388. In some embodiments, the polypeptide having protease activity comprises an amino acid sequence having at least 50%, at least 60%, at least 70%, at least 80%, at least 81%, at least 82%, at least 83%, at least 84%, at least 85%, at least 86%, at least 87%, at least 88%, at least 89%, at least 90%, at least 91%, at least 92%, at least 93%, at least 94%, at least 95%, at least 96%, at least 97%, at least 98%, or at least 99% sequence identity to SEQ ID NO: 389. In some embodiments, the polypeptide having protease activity comprises an amino acid sequence having at least 50%, at least 60%, at least 70%, at least 80%, at least 81%, at least 82%, at least 83%, at least 84%, at least 85%, at least 86%, at least 87%, at least 88%, at least 89%, at least 90%, at least 91%, at least 92%, at least 93%, at least 94%, at least 95%, at least 96%, at least 97%, at least 98%, or at least 99% sequence identity to SEQ ID NO: 390. In some embodiments, the polypeptide having protease activity comprises an amino acid sequence having at least 50%, at least 60%, at least 70%, at least 80%, at least 81%, at least 82%, at least 83%, at least 84%, at least 85%, at least 86%, at least 87%, at least 88%, at least 89%, at least 90%, at least 91%, at least 92%, at least 93%, at least 94%, at least 95%, at least 96%, at least 97%, at least 98%, or at least 99% sequence identity to SEQ ID NO: 391. In some embodiments, the polypeptide having protease activity comprises an amino acid sequence having at least 50%, at least 60%, at least 70%, at least 80%, at least 81%, at least 82%, at least 83%, at least 84%, at least 85%, at least 86%, at least 87%, at least 88%, at least 89%, at least 90%, at least 91%, at least 92%, at least 93%, at least 94%, at least 95%, at least 96%, at least 97%, at least 98%, or at least 99% sequence identity to SEQ ID NO: 392. In some embodiments, the polypeptide having protease activity comprises an amino acid sequence having at least 50%, at least 60%, at least 70%, at least 80%, at least 81%, at least 82%, at least 83%, at least 84%, at least 85%, at least 86%, at least 87%, at least 88%, at least 89%, at least 90%, at least 91%, at least 92%, at least 93%, at least 94%, at least 95%, at least 96%, at least 97%, at least 98%, or at least 99% sequence identity to SEQ ID NO: 393. In some embodiments, the polypeptide having protease activity comprises an amino acid sequence having at least 50%, at least 60%, at least 70%, at least 80%, at least 81%, at least 82%, at least 83%, at least 84%, at least 85%, at least 86%, at least 87%, at least 88%, at least 89%, at least 90%, at least 91%, at least 92%, at least 93%, at least 94%, at least 95%, at least 96%, at least 97%, at least 98%, or at least 99% sequence identity to SEQ ID NO: 394. In some embodiments, the polypeptide having protease activity comprises an amino acid sequence having at least 50%, at least 60%, at least 70%, at least 80%, at least 81%, at least 82%, at least 83%, at least 84%, at least 85%, at least 86%, at least 87%, at least 88%, at least 89%, at least 90%, at least 91%, at least 92%, at least 93%, at least 94%, at least 95%, at least 96%, at least 97%, at least 98%, or at least 99% sequence identity to SEQ ID NO: 395. In some embodiments, the polypeptide having protease activity comprises an amino acid sequence having at least 50%, at least 60%, at least 70%, at least 80%, at least 81%, at least 82%, at least 83%, at least 84%, at least 85%, at least 86%, at least 87%, at least 88%, at least 89%, at least 90%, at least 91%, at least 92%, at least 93%, at least 94%, at least 95%, at least 96%, at least 97%, at least 98%, or at least 99% sequence identity to SEQ ID NO: 396. In some embodiments, the polypeptide having protease activity comprises an amino acid sequence having at least 50%, at least 60%, at least 70%, at least 80%, at least 81%, at least 82%, at least 83%, at least 84%, at least 85%, at least 86%, at least 87%, at least 88%, at least 89%, at least 90%, at least 91%, at least 92%, at least 93%, at least 94%, at least 95%, at least 96%, at least 97%, at least 98%, or at least 99% sequence identity to SEQ ID NO: 397. In some embodiments, the polypeptide having protease activity comprises an amino acid sequence having at least 50%, at least 60%, at least 70%, at least 80%, at least 81%, at least 82%, at least 83%, at least 84%, at least 85%, at least 86%, at least 87%, at least 88%, at least 89%, at least 90%, at least 91%, at least 92%, at least 93%, at least 94%, at least 95%, at least 96%, at least 97%, at least 98%, or at least 99% sequence identity to SEQ ID NO: 398. In some embodiments, the polypeptide having protease activity comprises an amino acid sequence having at least 50%, at least 60%, at least 70%, at least 80%, at least 81%, at least 82%, at least 83%, at least 84%, at least 85%, at least 86%, at least 87%, at least 88%, at least 89%, at least 90%, at least 91%, at least 92%, at least 93%, at least 94%, at least 95%, at least 96%, at least 97%, at least 98%, or at least 99% sequence identity to SEQ ID NO: 399. In some embodiments, the polypeptide having protease activity comprises an amino acid sequence having at least 50%, at least 60%, at least 70%, at least 80%, at least 81%, at least 82%, at least 83%, at least 84%, at least 85%, at least 86%, at least 87%, at least 88%, at least 89%, at least 90%, at least 91%, at least 92%, at least 93%, at least 94%, at least 95%, at least 96%, at least 97%, at least 98%, or at least 99% sequence identity to SEQ ID NO: 400. In some embodiments, the polypeptide having protease activity comprises an amino acid sequence having at least 50%, at least 60%, at least 70%, at least 80%, at least 81%, at least 82%, at least 83%, at least 84%, at least 85%, at least 86%, at least 87%, at least 88%, at least 89%, at least 90%, at least 91%, at least 92%, at least 93%, at least 94%, at least 95%, at least 96%, at least 97%, at least 98%, or at least 99% sequence identity to SEQ ID NO: 401. In some embodiments, the polypeptide having protease activity comprises an amino acid sequence having at least 50%, at least 60%, at least 70%, at least 80%, at least 81%, at least 82%, at least 83%, at least 84%, at least 85%, at least 86%, at least 87%, at least 88%, at least 89%, at least 90%, at least 91%, at least 92%, at least 93%, at least 94%, at least 95%, at least 96%, at least 97%, at least 98%, or at least 99% sequence identity to SEQ ID NO: 402. In some embodiments, the polypeptide having protease activity comprises an amino acid sequence having at least 50%, at least 60%, at least 70%, at least 80%, at least 81%, at least 82%, at least 83%, at least 84%, at least 85%, at least 86%, at least 87%, at least 88%, at least 89%, at least 90%, at least 91%, at least 92%, at least 93%, at least 94%, at least 95%, at least 96%, at least 97%, at least 98%, or at least 99% sequence identity to SEQ ID NO: 403. In some embodiments, the polypeptide having protease activity comprises an amino acid sequence having at least 50%, at least 60%, at least 70%, at least 80%, at least 81%, at least 82%, at least 83%, at least 84%, at least 85%, at least 86%, at least 87%, at least 88%, at least 89%, at least 90%, at least 91%, at least 92%, at least 93%, at least 94%, at least 95%, at least 96%, at least 97%, at least 98%, or at least 99% sequence identity to SEQ ID NO: 404. In some embodiments, the polypeptide having protease activity comprises an amino acid sequence having at least 50%, at least 60%, at least 70%, at least 80%, at least 81%, at least 82%, at least 83%, at least 84%, at least 85%, at least 86%, at least 87%, at least 88%, at least 89%, at least 90%, at least 91%, at least 92%, at least 93%, at least 94%, at least 95%, at least 96%, at least 97%, at least 98%, or at least 99% sequence identity to SEQ ID NO: 405. In some embodiments, the polypeptide having protease activity comprises an amino acid sequence having at least 50%, at least 60%, at least 70%, at least 80%, at least 81%, at least 82%, at least 83%, at least 84%, at least 85%, at least 86%, at least 87%, at least 88%, at least 89%, at least 90%, at least 91%, at least 92%, at least 93%, at least 94%, at least 95%, at least 96%, at least 97%, at least 98%, or at least 99% sequence identity to SEQ ID NO: 406. In some embodiments, the polypeptide having protease activity comprises an amino acid sequence having at least 50%, at least 60%, at least 70%, at least 80%, at least 81%, at least 82%, at least 83%, at least 84%, at least 85%, at least 86%, at least 87%, at least 88%, at least 89%, at least 90%, at least 91%, at least 92%, at least 93%, at least 94%, at least 95%, at least 96%, at least 97%, at least 98%, or at least 99% sequence identity to SEQ ID NO: 407. In some embodiments, the polypeptide having protease activity comprises an amino acid sequence having at least 50%, at least 60%, at least 70%, at least 80%, at least 81%, at least 82%, at least 83%, at least 84%, at least 85%, at least 86%, at least 87%, at least 88%, at least 89%, at least 90%, at least 91%, at least 92%, at least 93%, at least 94%, at least 95%, at least 96%, at least 97%, at least 98%, or at least 99% sequence identity to SEQ ID NO: 408. In some embodiments, the polypeptide having protease activity comprises an amino acid sequence having at least 50%, at least 60%, at least 70%, at least 80%, at least 81%, at least 82%, at least 83%, at least 84%, at least 85%, at least 86%, at least 87%, at least 88%, at least 89%, at least 90%, at least 91%, at least 92%, at least 93%, at least 94%, at least 95%, at least 96%, at least 97%, at least 98%, or at least 99% sequence identity to SEQ ID NO: 409. In some embodiments, the polypeptide having protease activity comprises an amino acid sequence having at least 50%, at least 60%, at least 70%, at least 80%, at least 81%, at least 82%, at least 83%, at least 84%, at least 85%, at least 86%, at least 87%, at least 88%, at least 89%, at least 90%, at least 91%, at least 92%, at least 93%, at least 94%, at least 95%, at least 96%, at least 97%, at least 98%, or at least 99% sequence identity to SEQ ID NO: 410. In some embodiments, the polypeptide having protease activity comprises an amino acid sequence having at least 50%, at least 60%, at least 70%, at least 80%, at least 81%, at least 82%, at least 83%, at least 84%, at least 85%, at least 86%, at least 87%, at least 88%, at least 89%, at least 90%, at least 91%, at least 92%, at least 93%, at least 94%, at least 95%, at least 96%, at least 97%, at least 98%, or at least 99% sequence identity to SEQ ID NO: 411. In some embodiments, the polypeptide having protease activity comprises an amino acid sequence having at least 50%, at least 60%, at least 70%, at least 80%, at least 81%, at least 82%, at least 83%, at least 84%, at least 85%, at least 86%, at least 87%, at least 88%, at least 89%, at least 90%, at least 91%, at least 92%, at least 93%, at least 94%, at least 95%, at least 96%, at least 97%, at least 98%, or at least 99% sequence identity to SEQ ID NO: 412. In some embodiments, the polypeptide having protease activity comprises an amino acid sequence having at least 50%, at least 60%, at least 70%, at least 80%, at least 81%, at least 82%, at least 83%, at least 84%, at least 85%, at least 86%, at least 87%, at least 88%, at least 89%, at least 90%, at least 91%, at least 92%, at least 93%, at least 94%, at least 95%, at least 96%, at least 97%, at least 98%, or at least 99% sequence identity to SEQ ID NO: 413. In some embodiments, the polypeptide having protease activity comprises an amino acid sequence having at least 50%, at least 60%, at least 70%, at least 80%, at least 81%, at least 82%, at least 83%, at least 84%, at least 85%, at least 86%, at least 87%, at least 88%, at least 89%, at least 90%, at least 91%, at least 92%, at least 93%, at least 94%, at least 95%, at least 96%, at least 97%, at least 98%, or at least 99% sequence identity to SEQ ID NO: 414. In some embodiments, the polypeptide having protease activity comprises an amino acid sequence having at least 50%, at least 60%, at least 70%, at least 80%, at least 81%, at least 82%, at least 83%, at least 84%, at least 85%, at least 86%, at least 87%, at least 88%, at least 89%, at least 90%, at least 91%, at least 92%, at least 93%, at least 94%, at least 95%, at least 96%, at least 97%, at least 98%, or at least 99% sequence identity to SEQ ID NO: 415. In some embodiments, the polypeptide having protease activity comprises an amino acid sequence having at least 50%, at least 60%, at least 70%, at least 80%, at least 81%, at least 82%, at least 83%, at least 84%, at least 85%, at least 86%, at least 87%, at least 88%, at least 89%, at least 90%, at least 91%, at least 92%, at least 93%, at least 94%, at least 95%, at least 96%, at least 97%, at least 98%, or at least 99% sequence identity to SEQ ID NO: 416. In some embodiments, the polypeptide having protease activity comprises an amino acid sequence having at least 50%, at least 60%, at least 70%, at least 80%, at least 81%, at least 82%, at least 83%, at least 84%, at least 85%, at least 86%, at least 87%, at least 88%, at least 89%, at least 90%, at least 91%, at least 92%, at least 93%, at least 94%, at least 95%, at least 96%, at least 97%, at least 98%, or at least 99% sequence identity to SEQ ID NO: 417. In some embodiments, the polypeptide having protease activity comprises an amino acid sequence having at least 50%, at least 60%, at least 70%, at least 80%, at least 81%, at least 82%, at least 83%, at least 84%, at least 85%, at least 86%, at least 87%, at least 88%, at least 89%, at least 90%, at least 91%, at least 92%, at least 93%, at least 94%, at least 95%, at least 96%, at least 97%, at least 98%, or at least 99% sequence identity to SEQ ID NO: 418. In some embodiments, the polypeptide having protease activity comprises an amino acid sequence having at least 50%, at least 60%, at least 70%, at least 80%, at least 81%, at least 82%, at least 83%, at least 84%, at least 85%, at least 86%, at least 87%, at least 88%, at least 89%, at least 90%, at least 91%, at least 92%, at least 93%, at least 94%, at least 95%, at least 96%, at least 97%, at least 98%, or at least 99% sequence identity to SEQ ID NO: 419. In some embodiments, the polypeptide having protease activity comprises an amino acid sequence having at least 50%, at least 60%, at least 70%, at least 80%, at least 81%, at least 82%, at least 83%, at least 84%, at least 85%, at least 86%, at least 87%, at least 88%, at least 89%, at least 90%, at least 91%, at least 92%, at least 93%, at least 94%, at least 95%, at least 96%, at least 97%, at least 98%, or at least 99% sequence identity to SEQ ID NO: 420. In some embodiments, the polypeptide having protease activity comprises an amino acid sequence having at least 50%, at least 60%, at least 70%, at least 80%, at least 81%, at least 82%, at least 83%, at least 84%, at least 85%, at least 86%, at least 87%, at least 88%, at least 89%, at least 90%, at least 91%, at least 92%, at least 93%, at least 94%, at least 95%, at least 96%, at least 97%, at least 98%, or at least 99% sequence identity to SEQ ID NO: 421. In some embodiments, the polypeptide having protease activity comprises an amino acid sequence having at least 50%, at least 60%, at least 70%, at least 80%, at least 81%, at least 82%, at least 83%, at least 84%, at least 85%, at least 86%, at least 87%, at least 88%, at least 89%, at least 90%, at least 91%, at least 92%, at least 93%, at least 94%, at least 95%, at least 96%, at least 97%, at least 98%, or at least 99% sequence identity to SEQ ID NO: 422. In some embodiments, the polypeptide having protease activity comprises an amino acid sequence having at least 50%, at least 60%, at least 70%, at least 80%, at least 81%, at least 82%, at least 83%, at least 84%, at least 85%, at least 86%, at least 87%, at least 88%, at least 89%, at least 90%, at least 91%, at least 92%, at least 93%, at least 94%, at least 95%, at least 96%, at least 97%, at least 98%, or at least 99% sequence identity to SEQ ID NO: 423. In some embodiments, the polypeptide having protease activity comprises an amino acid sequence having at least 50%, at least 60%, at least 70%, at least 80%, at least 81%, at least 82%, at least 83%, at least 84%, at least 85%, at least 86%, at least 87%, at least 88%, at least 89%, at least 90%, at least 91%, at least 92%, at least 93%, at least 94%, at least 95%, at least 96%, at least 97%, at least 98%, or at least 99% sequence identity to SEQ ID NO: 424. In some embodiments, the polypeptide having protease activity comprises an amino acid sequence having at least 50%, at least 60%, at least 70%, at least 80%, at least 81%, at least 82%, at least 83%, at least 84%, at least 85%, at least 86%, at least 87%, at least 88%, at least 89%, at least 90%, at least 91%, at least 92%, at least 93%, at least 94%, at least 95%, at least 96%, at least 97%, at least 98%, or at least 99% sequence identity to SEQ ID NO: 425. In some embodiments, the polypeptide having protease activity comprises an amino acid sequence having at least 50%, at least 60%, at least 70%, at least 80%, at least 81%, at least 82%, at least 83%, at least 84%, at least 85%, at least 86%, at least 87%, at least 88%, at least 89%, at least 90%, at least 91%, at least 92%, at least 93%, at least 94%, at least 95%, at least 96%, at least 97%, at least 98%, or at least 99% sequence identity to SEQ ID NO: 426. In some embodiments, the polypeptide having protease activity comprises an amino acid sequence having at least 50%, at least 60%, at least 70%, at least 80%, at least 81%, at least 82%, at least 83%, at least 84%, at least 85%, at least 86%, at least 87%, at least 88%, at least 89%, at least 90%, at least 91%, at least 92%, at least 93%, at least 94%, at least 95%, at least 96%, at least 97%, at least 98%, or at least 99% sequence identity to SEQ ID NO: 427. In some embodiments, the polypeptide having protease activity comprises an amino acid sequence having at least 50%, at least 60%, at least 70%, at least 80%, at least 81%, at least 82%, at least 83%, at least 84%, at least 85%, at least 86%, at least 87%, at least 88%, at least 89%, at least 90%, at least 91%, at least 92%, at least 93%, at least 94%, at least 95%, at least 96%, at least 97%, at least 98%, or at least 99% sequence identity to SEQ ID NO: 428. In some embodiments, the polypeptide having protease activity comprises an amino acid sequence having at least 50%, at least 60%, at least 70%, at least 80%, at least 81%, at least 82%, at least 83%, at least 84%, at least 85%, at least 86%, at least 87%, at least 88%, at least 89%, at least 90%, at least 91%, at least 92%, at least 93%, at least 94%, at least 95%, at least 96%, at least 97%, at least 98%, or at least 99% sequence identity to SEQ ID NO: 429. In some embodiments, the polypeptide having protease activity comprises an amino acid sequence having at least 50%, at least 60%, at least 70%, at least 80%, at least 81%, at least 82%, at least 83%, at least 84%, at least 85%, at least 86%, at least 87%, at least 88%, at least 89%, at least 90%, at least 91%, at least 92%, at least 93%, at least 94%, at least 95%, at least 96%, at least 97%, at least 98%, or at least 99% sequence identity to SEQ ID NO: 430. In some embodiments, the polypeptide having protease activity comprises an amino acid sequence having at least 50%, at least 60%, at least 70%, at least 80%, at least 81%, at least 82%, at least 83%, at least 84%, at least 85%, at least 86%, at least 87%, at least 88%, at least 89%, at least 90%, at least 91%, at least 92%, at least 93%, at least 94%, at least 95%, at least 96%, at least 97%, at least 98%, or at least 99% sequence identity to SEQ ID NO: 431. In some embodiments, the polypeptide having protease activity comprises an amino acid sequence having at least 50%, at least 60%, at least 70%, at least 80%, at least 81%, at least 82%, at least 83%, at least 84%, at least 85%, at least 86%, at least 87%, at least 88%, at least 89%, at least 90%, at least 91%, at least 92%, at least 93%, at least 94%, at least 95%, at least 96%, at least 97%, at least 98%, or at least 99% sequence identity to SEQ ID NO: 432. In some embodiments, the polypeptide having protease activity comprises an amino acid sequence having at least 50%, at least 60%, at least 70%, at least 80%, at least 81%, at least 82%, at least 83%, at least 84%, at least 85%, at least 86%, at least 87%, at least 88%, at least 89%, at least 90%, at least 91%, at least 92%, at least 93%, at least 94%, at least 95%, at least 96%, at least 97%, at least 98%, or at least 99% sequence identity to SEQ ID NO: 433. In some embodiments, the polypeptide having protease activity comprises an amino acid sequence having at least 50%, at least 60%, at least 70%, at least 80%, at least 81%, at least 82%, at least 83%, at least 84%, at least 85%, at least 86%, at least 87%, at least 88%, at least 89%, at least 90%, at least 91%, at least 92%, at least 93%, at least 94%, at least 95%, at least 96%, at least 97%, at least 98%, or at least 99% sequence identity to SEQ ID NO: 434. In some embodiments, the polypeptide having protease activity comprises an amino acid sequence having at least 50%, at least 60%, at least 70%, at least 80%, at least 81%, at least 82%, at least 83%, at least 84%, at least 85%, at least 86%, at least 87%, at least 88%, at least 89%, at least 90%, at least 91%, at least 92%, at least 93%, at least 94%, at least 95%, at least 96%, at least 97%, at least 98%, or at least 99% sequence identity to SEQ ID NO: 435. In some embodiments, the polypeptide having protease activity comprises an amino acid sequence having at least 50%, at least 60%, at least 70%, at least 80%, at least 81%, at least 82%, at least 83%, at least 84%, at least 85%, at least 86%, at least 87%, at least 88%, at least 89%, at least 90%, at least 91%, at least 92%, at least 93%, at least 94%, at least 95%, at least 96%, at least 97%, at least 98%, or at least 99% sequence identity to SEQ ID NO: 436. In some embodiments, the polypeptide having protease activity comprises an amino acid sequence having at least 50%, at least 60%, at least 70%, at least 80%, at least 81%, at least 82%, at least 83%, at least 84%, at least 85%, at least 86%, at least 87%, at least 88%, at least 89%, at least 90%, at least 91%, at least 92%, at least 93%, at least 94%, at least 95%, at least 96%, at least 97%, at least 98%, or at least 99% sequence identity to SEQ ID NO: 437. In some embodiments, the polypeptide having protease activity comprises an amino acid sequence having at least 50%, at least 60%, at least 70%, at least 80%, at least 81%, at least 82%, at least 83%, at least 84%, at least 85%, at least 86%, at least 87%, at least 88%, at least 89%, at least 90%, at least 91%, at least 92%, at least 93%, at least 94%, at least 95%, at least 96%, at least 97%, at least 98%, or at least 99% sequence identity to SEQ ID NO: 438. In some embodiments, the polypeptide having protease activity comprises an amino acid sequence having at least 50%, at least 60%, at least 70%, at least 80%, at least 81%, at least 82%, at least 83%, at least 84%, at least 85%, at least 86%, at least 87%, at least 88%, at least 89%, at least 90%, at least 91%, at least 92%, at least 93%, at least 94%, at least 95%, at least 96%, at least 97%, at least 98%, or at least 99% sequence identity to SEQ ID NO: 439. In some embodiments, the polypeptide having protease activity comprises an amino acid sequence having at least 50%, at least 60%, at least 70%, at least 80%, at least 81%, at least 82%, at least 83%, at least 84%, at least 85%, at least 86%, at least 87%, at least 88%, at least 89%, at least 90%, at least 91%, at least 92%, at least 93%, at least 94%, at least 95%, at least 96%, at least 97%, at least 98%, or at least 99% sequence identity to SEQ ID NO: 440. In some embodiments, the polypeptide having protease activity comprises an amino acid sequence having at least 50%, at least 60%, at least 70%, at least 80%, at least 81%, at least 82%, at least 83%, at least 84%, at least 85%, at least 86%, at least 87%, at least 88%, at least 89%, at least 90%, at least 91%, at least 92%, at least 93%, at least 94%, at least 95%, at least 96%, at least 97%, at least 98%, or at least 99% sequence identity to SEQ ID NO: 441. In some embodiments, the polypeptide having protease activity comprises an amino acid sequence having at least 50%, at least 60%, at least 70%, at least 80%, at least 81%, at least 82%, at least 83%, at least 84%, at least 85%, at least 86%, at least 87%, at least 88%, at least 89%, at least 90%, at least 91%, at least 92%, at least 93%, at least 94%, at least 95%, at least 96%, at least 97%, at least 98%, or at least 99% sequence identity to SEQ ID NO: 442. In some embodiments, the polypeptide having protease activity comprises an amino acid sequence having at least 50%, at least 60%, at least 70%, at least 80%, at least 81%, at least 82%, at least 83%, at least 84%, at least 85%, at least 86%, at least 87%, at least 88%, at least 89%, at least 90%, at least 91%, at least 92%, at least 93%, at least 94%, at least 95%, at least 96%, at least 97%, at least 98%, or at least 99% sequence identity to SEQ ID NO: 443. In some embodiments, the polypeptide having protease activity comprises an amino acid sequence having at least 50%, at least 60%, at least 70%, at least 80%, at least 81%, at least 82%, at least 83%, at least 84%, at least 85%, at least 86%, at least 87%, at least 88%, at least 89%, at least 90%, at least 91%, at least 92%, at least 93%, at least 94%, at least 95%, at least 96%, at least 97%, at least 98%, or at least 99% sequence identity to SEQ ID NO: 444. In some embodiments, the polypeptide having protease activity comprises an amino acid sequence having at least 50%, at least 60%, at least 70%, at least 80%, at least 81%, at least 82%, at least 83%, at least 84%, at least 85%, at least 86%, at least 87%, at least 88%, at least 89%, at least 90%, at least 91%, at least 92%, at least 93%, at least 94%, at least 95%, at least 96%, at least 97%, at least 98%, or at least 99% sequence identity to SEQ ID NO: 445. In some embodiments, the polypeptide having protease activity comprises an amino acid sequence having at least 50%, at least 60%, at least 70%, at least 80%, at least 81%, at least 82%, at least 83%, at least 84%, at least 85%, at least 86%, at least 87%, at least 88%, at least 89%, at least 90%, at least 91%, at least 92%, at least 93%, at least 94%, at least 95%, at least 96%, at least 97%, at least 98%, or at least 99% sequence identity to SEQ ID NO: 446. In some embodiments, the polypeptide having protease activity comprises an amino acid sequence having at least 50%, at least 60%, at least 70%, at least 80%, at least 81%, at least 82%, at least 83%, at least 84%, at least 85%, at least 86%, at least 87%, at least 88%, at least 89%, at least 90%, at least 91%, at least 92%, at least 93%, at least 94%, at least 95%, at least 96%, at least 97%, at least 98%, or at least 99% sequence identity to SEQ ID NO: 447. In some embodiments, the polypeptide having protease activity comprises an amino acid sequence having at least 50%, at least 60%, at least 70%, at least 80%, at least 81%, at least 82%, at least 83%, at least 84%, at least 85%, at least 86%, at least 87%, at least 88%, at least 89%, at least 90%, at least 91%, at least 92%, at least 93%, at least 94%, at least 95%, at least 96%, at least 97%, at least 98%, or at least 99% sequence identity to SEQ ID NO: 448. In some embodiments, the polypeptide having protease activity comprises an amino acid sequence having at least 50%, at least 60%, at least 70%, at least 80%, at least 81%, at least 82%, at least 83%, at least 84%, at least 85%, at least 86%, at least 87%, at least 88%, at least 89%, at least 90%, at least 91%, at least 92%, at least 93%, at least 94%, at least 95%, at least 96%, at least 97%, at least 98%, or at least 99% sequence identity to SEQ ID NO: 449. In some embodiments, the polypeptide having protease activity comprises an amino acid sequence having at least 50%, at least 60%, at least 70%, at least 80%, at least 81%, at least 82%, at least 83%, at least 84%, at least 85%, at least 86%, at least 87%, at least 88%, at least 89%, at least 90%, at least 91%, at least 92%, at least 93%, at least 94%, at least 95%, at least 96%, at least 97%, at least 98%, or at least 99% sequence identity to SEQ ID NO: 450. In some embodiments, the polypeptide having protease activity comprises an amino acid sequence having at least 50%, at least 60%, at least 70%, at least 80%, at least 81%, at least 82%, at least 83%, at least 84%, at least 85%, at least 86%, at least 87%, at least 88%, at least 89%, at least 90%, at least 91%, at least 92%, at least 93%, at least 94%, at least 95%, at least 96%, at least 97%, at least 98%, or at least 99% sequence identity to SEQ ID NO: 451. In some embodiments, the polypeptide having protease activity comprises an amino acid sequence having at least 50%, at least 60%, at least 70%, at least 80%, at least 81%, at least 82%, at least 83%, at least 84%, at least 85%, at least 86%, at least 87%, at least 88%, at least 89%, at least 90%, at least 91%, at least 92%, at least 93%, at least 94%, at least 95%, at least 96%, at least 97%, at least 98%, or at least 99% sequence identity to SEQ ID NO: 452. In some embodiments, the polypeptide having protease activity comprises an amino acid sequence having at least 50%, at least 60%, at least 70%, at least 80%, at least 81%, at least 82%, at least 83%, at least 84%, at least 85%, at least 86%, at least 87%, at least 88%, at least 89%, at least 90%, at least 91%, at least 92%, at least 93%, at least 94%, at least 95%, at least 96%, at least 97%, at least 98%, or at least 99% sequence identity to SEQ ID NO: 453. In some embodiments, the polypeptide having protease activity comprises an amino acid sequence having at least 50%, at least 60%, at least 70%, at least 80%, at least 81%, at least 82%, at least 83%, at least 84%, at least 85%, at least 86%, at least 87%, at least 88%, at least 89%, at least 90%, at least 91%, at least 92%, at least 93%, at least 94%, at least 95%, at least 96%, at least 97%, at least 98%, or at least 99% sequence identity to SEQ ID NO: 454. In some embodiments, the polypeptide having protease activity comprises an amino acid sequence having at least 50%, at least 60%, at least 70%, at least 80%, at least 81%, at least 82%, at least 83%, at least 84%, at least 85%, at least 86%, at least 87%, at least 88%, at least 89%, at least 90%, at least 91%, at least 92%, at least 93%, at least 94%, at least 95%, at least 96%, at least 97%, at least 98%, or at least 99% sequence identity to SEQ ID NO: 455. In some embodiments, the polypeptide having protease activity comprises an amino acid sequence having at least 50%, at least 60%, at least 70%, at least 80%, at least 81%, at least 82%, at least 83%, at least 84%, at least 85%, at least 86%, at least 87%, at least 88%, at least 89%, at least 90%, at least 91%, at least 92%, at least 93%, at least 94%, at least 95%, at least 96%, at least 97%, at least 98%, or at least 99% sequence identity to SEQ ID NO: 456. In some embodiments, the polypeptide having protease activity comprises an amino acid sequence having at least 50%, at least 60%, at least 70%, at least 80%, at least 81%, at least 82%, at least 83%, at least 84%, at least 85%, at least 86%, at least 87%, at least 88%, at least 89%, at least 90%, at least 91%, at least 92%, at least 93%, at least 94%, at least 95%, at least 96%, at least 97%, at least 98%, or at least 99% sequence identity to SEQ ID NO: 457. In some embodiments, the polypeptide having protease activity comprises an amino acid sequence having at least 50%, at least 60%, at least 70%, at least 80%, at least 81%, at least 82%, at least 83%, at least 84%, at least 85%, at least 86%, at least 87%, at least 88%, at least 89%, at least 90%, at least 91%, at least 92%, at least 93%, at least 94%, at least 95%, at least 96%, at least 97%, at least 98%, or at least 99% sequence identity to SEQ ID NO: 458. In some embodiments, the polypeptide having protease activity comprises an amino acid sequence having at least 50%, at least 60%, at least 70%, at least 80%, at least 81%, at least 82%, at least 83%, at least 84%, at least 85%, at least 86%, at least 87%, at least 88%, at least 89%, at least 90%, at least 91%, at least 92%, at least 93%, at least 94%, at least 95%, at least 96%, at least 97%, at least 98%, or at least 99% sequence identity to SEQ ID NO: 459. In some embodiments, the polypeptide having protease activity comprises an amino acid sequence having at least 50%, at least 60%, at least 70%, at least 80%, at least 81%, at least 82%, at least 83%, at least 84%, at least 85%, at least 86%, at least 87%, at least 88%, at least 89%, at least 90%, at least 91%, at least 92%, at least 93%, at least 94%, at least 95%, at least 96%, at least 97%, at least 98%, or at least 99% sequence identity to SEQ ID NO: 460. In some embodiments, the polypeptide having protease activity comprises an amino acid sequence having at least 50%, at least 60%, at least 70%, at least 80%, at least 81%, at least 82%, at least 83%, at least 84%, at least 85%, at least 86%, at least 87%, at least 88%, at least 89%, at least 90%, at least 91%, at least 92%, at least 93%, at least 94%, at least 95%, at least 96%, at least 97%, at least 98%, or at least 99% sequence identity to SEQ ID NO: 461. In some embodiments, the polypeptide having protease activity comprises an amino acid sequence having at least 50%, at least 60%, at least 70%, at least 80%, at least 81%, at least 82%, at least 83%, at least 84%, at least 85%, at least 86%, at least 87%, at least 88%, at least 89%, at least 90%, at least 91%, at least 92%, at least 93%, at least 94%, at least 95%, at least 96%, at least 97%, at least 98%, or at least 99% sequence identity to SEQ ID NO: 462. In some embodiments, the polypeptide having protease activity comprises an amino acid sequence having at least 50%, at least 60%, at least 70%, at least 80%, at least 81%, at least 82%, at least 83%, at least 84%, at least 85%, at least 86%, at least 87%, at least 88%, at least 89%, at least 90%, at least 91%, at least 92%, at least 93%, at least 94%, at least 95%, at least 96%, at least 97%, at least 98%, or at least 99% sequence identity to SEQ ID NO: 463. In some embodiments, the polypeptide having protease activity comprises an amino acid sequence having at least 50%, at least 60%, at least 70%, at least 80%, at least 81%, at least 82%, at least 83%, at least 84%, at least 85%, at least 86%, at least 87%, at least 88%, at least 89%, at least 90%, at least 91%, at least 92%, at least 93%, at least 94%, at least 95%, at least 96%, at least 97%, at least 98%, or at least 99% sequence identity to SEQ ID NO: 464. In some embodiments, the polypeptide having protease activity comprises an amino acid sequence having at least 50%, at least 60%, at least 70%, at least 80%, at least 81%, at least 82%, at least 83%, at least 84%, at least 85%, at least 86%, at least 87%, at least 88%, at least 89%, at least 90%, at least 91%, at least 92%, at least 93%, at least 94%, at least 95%, at least 96%, at least 97%, at least 98%, or at least 99% sequence identity to SEQ ID NO: 465. In some embodiments, the polypeptide having protease activity comprises an amino acid sequence having at least 50%, at least 60%, at least 70%, at least 80%, at least 81%, at least 82%, at least 83%, at least 84%, at least 85%, at least 86%, at least 87%, at least 88%, at least 89%, at least 90%, at least 91%, at least 92%, at least 93%, at least 94%, at least 95%, at least 96%, at least 97%, at least 98%, or at least 99% sequence identity to SEQ ID NO: 466. In some embodiments, the polypeptide having protease activity comprises an amino acid sequence having at least 50%, at least 60%, at least 70%, at least 80%, at least 81%, at least 82%, at least 83%, at least 84%, at least 85%, at least 86%, at least 87%, at least 88%, at least 89%, at least 90%, at least 91%, at least 92%, at least 93%, at least 94%, at least 95%, at least 96%, at least 97%, at least 98%, or at least 99% sequence identity to SEQ ID NO: 467. In some embodiments, the polypeptide having protease activity comprises an amino acid sequence having at least 50%, at least 60%, at least 70%, at least 80%, at least 81%, at least 82%, at least 83%, at least 84%, at least 85%, at least 86%, at least 87%, at least 88%, at least 89%, at least 90%, at least 91%, at least 92%, at least 93%, at least 94%, at least 95%, at least 96%, at least 97%, at least 98%, or at least 99% sequence identity to SEQ ID NO: 468. In some embodiments, the polypeptide having protease activity comprises an amino acid sequence having at least 50%, at least 60%, at least 70%, at least 80%, at least 81%, at least 82%, at least 83%, at least 84%, at least 85%, at least 86%, at least 87%, at least 88%, at least 89%, at least 90%, at least 91%, at least 92%, at least 93%, at least 94%, at least 95%, at least 96%, at least 97%, at least 98%, or at least 99% sequence identity to SEQ ID NO: 469. In some embodiments, the polypeptide having protease activity comprises an amino acid sequence having at least 50%, at least 60%, at least 70%, at least 80%, at least 81%, at least 82%, at least 83%, at least 84%, at least 85%, at least 86%, at least 87%, at least 88%, at least 89%, at least 90%, at least 91%, at least 92%, at least 93%, at least 94%, at least 95%, at least 96%, at least 97%, at least 98%, or at least 99% sequence identity to SEQ ID NO: 470. In some embodiments, the polypeptide having protease activity comprises an amino acid sequence having at least 50%, at least 60%, at least 70%, at least 80%, at least 81%, at least 82%, at least 83%, at least 84%, at least 85%, at least 86%, at least 87%, at least 88%, at least 89%, at least 90%, at least 91%, at least 92%, at least 93%, at least 94%, at least 95%, at least 96%, at least 97%, at least 98%, or at least 99% sequence identity to SEQ ID NO: 471. In some embodiments, the polypeptide having protease activity comprises an amino acid sequence having at least 50%, at least 60%, at least 70%, at least 80%, at least 81%, at least 82%, at least 83%, at least 84%, at least 85%, at least 86%, at least 87%, at least 88%, at least 89%, at least 90%, at least 91%, at least 92%, at least 93%, at least 94%, at least 95%, at least 96%, at least 97%, at least 98%, or at least 99% sequence identity to SEQ ID NO: 472. In some embodiments, the polypeptide having protease activity comprises an amino acid sequence having at least 50%, at least 60%, at least 70%, at least 80%, at least 81%, at least 82%, at least 83%, at least 84%, at least 85%, at least 86%, at least 87%, at least 88%, at least 89%, at least 90%, at least 91%, at least 92%, at least 93%, at least 94%, at least 95%, at least 96%, at least 97%, at least 98%, or at least 99% sequence identity to SEQ ID NO: 473. In some embodiments, the polypeptide having protease activity comprises an amino acid sequence having at least 50%, at least 60%, at least 70%, at least 80%, at least 81%, at least 82%, at least 83%, at least 84%, at least 85%, at least 86%, at least 87%, at least 88%, at least 89%, at least 90%, at least 91%, at least 92%, at least 93%, at least 94%, at least 95%, at least 96%, at least 97%, at least 98%, or at least 99% sequence identity to SEQ ID NO: 474. In some embodiments, the polypeptide having protease activity comprises an amino acid sequence having at least 50%, at least 60%, at least 70%, at least 80%, at least 81%, at least 82%, at least 83%, at least 84%, at least 85%, at least 86%, at least 87%, at least 88%, at least 89%, at least 90%, at least 91%, at least 92%, at least 93%, at least 94%, at least 95%, at least 96%, at least 97%, at least 98%, or at least 99% sequence identity to SEQ ID NO: 475. In some embodiments, the polypeptide having protease activity comprises an amino acid sequence having at least 50%, at least 60%, at least 70%, at least 80%, at least 81%, at least 82%, at least 83%, at least 84%, at least 85%, at least 86%, at least 87%, at least 88%, at least 89%, at least 90%, at least 91%, at least 92%, at least 93%, at least 94%, at least 95%, at least 96%, at least 97%, at least 98%, or at least 99% sequence identity to SEQ ID NO: 476. In some embodiments, the polypeptide having protease activity comprises an amino acid sequence having at least 50%, at least 60%, at least 70%, at least 80%, at least 81%, at least 82%, at least 83%, at least 84%, at least 85%, at least 86%, at least 87%, at least 88%, at least 89%, at least 90%, at least 91%, at least 92%, at least 93%, at least 94%, at least 95%, at least 96%, at least 97%, at least 98%, or at least 99% sequence identity to SEQ ID NO: 477. In some embodiments, the polypeptide having protease activity comprises an amino acid sequence having at least 50%, at least 60%, at least 70%, at least 80%, at least 81%, at least 82%, at least 83%, at least 84%, at least 85%, at least 86%, at least 87%, at least 88%, at least 89%, at least 90%, at least 91%, at least 92%, at least 93%, at least 94%, at least 95%, at least 96%, at least 97%, at least 98%, or at least 99% sequence identity to SEQ ID NO: 478. In some embodiments, the polypeptide having protease activity comprises an amino acid sequence having at least 50%, at least 60%, at least 70%, at least 80%, at least 81%, at least 82%, at least 83%, at least 84%, at least 85%, at least 86%, at least 87%, at least 88%, at least 89%, at least 90%, at least 91%, at least 92%, at least 93%, at least 94%, at least 95%, at least 96%, at least 97%, at least 98%, or at least 99% sequence identity to SEQ ID NO: 479. In some embodiments, the polypeptide having protease activity comprises an amino acid sequence having at least 50%, at least 60%, at least 70%, at least 80%, at least 81%, at least 82%, at least 83%, at least 84%, at least 85%, at least 86%, at least 87%, at least 88%, at least 89%, at least 90%, at least 91%, at least 92%, at least 93%, at least 94%, at least 95%, at least 96%, at least 97%, at least 98%, or at least 99% sequence identity to SEQ ID NO: 480. In some embodiments, the polypeptide having protease activity comprises an amino acid sequence having at least 50%, at least 60%, at least 70%, at least 80%, at least 81%, at least 82%, at least 83%, at least 84%, at least 85%, at least 86%, at least 87%, at least 88%, at least 89%, at least 90%, at least 91%, at least 92%, at least 93%, at least 94%, at least 95%, at least 96%, at least 97%, at least 98%, or at least 99% sequence identity to SEQ ID NO: 481. In some embodiments, the polypeptide having protease activity comprises an amino acid sequence having at least 50%, at least 60%, at least 70%, at least 80%, at least 81%, at least 82%, at least 83%, at least 84%, at least 85%, at least 86%, at least 87%, at least 88%, at least 89%, at least 90%, at least 91%, at least 92%, at least 93%, at least 94%, at least 95%, at least 96%, at least 97%, at least 98%, or at least 99% sequence identity to SEQ ID NO: 482. In some embodiments, the polypeptide having protease activity comprises an amino acid sequence having at least 50%, at least 60%, at least 70%, at least 80%, at least 81%, at least 82%, at least 83%, at least 84%, at least 85%, at least 86%, at least 87%, at least 88%, at least 89%, at least 90%, at least 91%, at least 92%, at least 93%, at least 94%, at least 95%, at least 96%, at least 97%, at least 98%, or at least 99% sequence identity to SEQ ID NO: 483. In some embodiments, the polypeptide having protease activity comprises an amino acid sequence having at least 50%, at least 60%, at least 70%, at least 80%, at least 81%, at least 82%, at least 83%, at least 84%, at least 85%, at least 86%, at least 87%, at least 88%, at least 89%, at least 90%, at least 91%, at least 92%, at least 93%, at least 94%, at least 95%, at least 96%, at least 97%, at least 98%, or at least 99% sequence identity to SEQ ID NO: 484. In some embodiments, the polypeptide having protease activity comprises an amino acid sequence having at least 50%, at least 60%, at least 70%, at least 80%, at least 81%, at least 82%, at least 83%, at least 84%, at least 85%, at least 86%, at least 87%, at least 88%, at least 89%, at least 90%, at least 91%, at least 92%, at least 93%, at least 94%, at least 95%, at least 96%, at least 97%, at least 98%, or at least 99% sequence identity to SEQ ID NO: 485. In some embodiments, the polypeptide having protease activity comprises an amino acid sequence having at least 50%, at least 60%, at least 70%, at least 80%, at least 81%, at least 82%, at least 83%, at least 84%, at least 85%, at least 86%, at least 87%, at least 88%, at least 89%, at least 90%, at least 91%, at least 92%, at least 93%, at least 94%, at least 95%, at least 96%, at least 97%, at least 98%, or at least 99% sequence identity to SEQ ID NO: 486. In some embodiments, the polypeptide having protease activity comprises an amino acid sequence having at least 50%, at least 60%, at least 70%, at least 80%, at least 81%, at least 82%, at least 83%, at least 84%, at least 85%, at least 86%, at least 87%, at least 88%, at least 89%, at least 90%, at least 91%, at least 92%, at least 93%, at least 94%, at least 95%, at least 96%, at least 97%, at least 98%, or at least 99% sequence identity to SEQ ID NO: 487. In some embodiments, the polypeptide having protease activity comprises an amino acid sequence having at least 50%, at least 60%, at least 70%, at least 80%, at least 81%, at least 82%, at least 83%, at least 84%, at least 85%, at least 86%, at least 87%, at least 88%, at least 89%, at least 90%, at least 91%, at least 92%, at least 93%, at least 94%, at least 95%, at least 96%, at least 97%, at least 98%, or at least 99% sequence identity to SEQ ID NO: 488. In some embodiments, the polypeptide having protease activity comprises an amino acid sequence having at least 50%, at least 60%, at least 70%, at least 80%, at least 81%, at least 82%, at least 83%, at least 84%, at least 85%, at least 86%, at least 87%, at least 88%, at least 89%, at least 90%, at least 91%, at least 92%, at least 93%, at least 94%, at least 95%, at least 96%, at least 97%, at least 98%, or at least 99% sequence identity to SEQ ID NO: 489. In some embodiments, the polypeptide having protease activity comprises an amino acid sequence having at least 50%, at least 60%, at least 70%, at least 80%, at least 81%, at least 82%, at least 83%, at least 84%, at least 85%, at least 86%, at least 87%, at least 88%, at least 89%, at least 90%, at least 91%, at least 92%, at least 93%, at least 94%, at least 95%, at least 96%, at least 97%, at least 98%, or at least 99% sequence identity to SEQ ID NO: 490. In some embodiments, the polypeptide having protease activity comprises an amino acid sequence having at least 50%, at least 60%, at least 70%, at least 80%, at least 81%, at least 82%, at least 83%, at least 84%, at least 85%, at least 86%, at least 87%, at least 88%, at least 89%, at least 90%, at least 91%, at least 92%, at least 93%, at least 94%, at least 95%, at least 96%, at least 97%, at least 98%, or at least 99% sequence identity to SEQ ID NO: 491. In some embodiments, the polypeptide having protease activity comprises an amino acid sequence having at least 50%, at least 60%, at least 70%, at least 80%, at least 81%, at least 82%, at least 83%, at least 84%, at least 85%, at least 86%, at least 87%, at least 88%, at least 89%, at least 90%, at least 91%, at least 92%, at least 93%, at least 94%, at least 95%, at least 96%, at least 97%, at least 98%, or at least 99% sequence identity to SEQ ID NO: 492. In some embodiments, the polypeptide having protease activity comprises an amino acid sequence having at least 50%, at least 60%, at least 70%, at least 80%, at least 81%, at least 82%, at least 83%, at least 84%, at least 85%, at least 86%, at least 87%, at least 88%, at least 89%, at least 90%, at least 91%, at least 92%, at least 93%, at least 94%, at least 95%, at least 96%, at least 97%, at least 98%, or at least 99% sequence identity to SEQ ID NO: 493. In some embodiments, the polypeptide having protease activity comprises an amino acid sequence having at least 50%, at least 60%, at least 70%, at least 80%, at least 81%, at least 82%, at least 83%, at least 84%, at least 85%, at least 86%, at least 87%, at least 88%, at least 89%, at least 90%, at least 91%, at least 92%, at least 93%, at least 94%, at least 95%, at least 96%, at least 97%, at least 98%, or at least 99% sequence identity to SEQ ID NO: 494. In some embodiments, the polypeptide having protease activity comprises an amino acid sequence having at least 50%, at least 60%, at least 70%, at least 80%, at least 81%, at least 82%, at least 83%, at least 84%, at least 85%, at least 86%, at least 87%, at least 88%, at least 89%, at least 90%, at least 91%, at least 92%, at least 93%, at least 94%, at least 95%, at least 96%, at least 97%, at least 98%, or at least 99% sequence identity to SEQ ID NO: 495. In some embodiments, the polypeptide having protease activity comprises an amino acid sequence having at least 50%, at least 60%, at least 70%, at least 80%, at least 81%, at least 82%, at least 83%, at least 84%, at least 85%, at least 86%, at least 87%, at least 88%, at least 89%, at least 90%, at least 91%, at least 92%, at least 93%, at least 94%, at least 95%, at least 96%, at least 97%, at least 98%, or at least 99% sequence identity to SEQ ID NO: 496. In some embodiments, the polypeptide having protease activity comprises an amino acid sequence having at least 50%, at least 60%, at least 70%, at least 80%, at least 81%, at least 82%, at least 83%, at least 84%, at least 85%, at least 86%, at least 87%, at least 88%, at least 89%, at least 90%, at least 91%, at least 92%, at least 93%, at least 94%, at least 95%, at least 96%, at least 97%, at least 98%, or at least 99% sequence identity to SEQ ID NO: 497. In some embodiments, the polypeptide having protease activity comprises an amino acid sequence having at least 50%, at least 60%, at least 70%, at least 80%, at least 81%, at least 82%, at least 83%, at least 84%, at least 85%, at least 86%, at least 87%, at least 88%, at least 89%, at least 90%, at least 91%, at least 92%, at least 93%, at least 94%, at least 95%, at least 96%, at least 97%, at least 98%, or at least 99% sequence identity to SEQ ID NO: 498. In some embodiments, the polypeptide having protease activity comprises an amino acid sequence having at least 50%, at least 60%, at least 70%, at least 80%, at least 81%, at least 82%, at least 83%, at least 84%, at least 85%, at least 86%, at least 87%, at least 88%, at least 89%, at least 90%, at least 91%, at least 92%, at least 93%, at least 94%, at least 95%, at least 96%, at least 97%, at least 98%, or at least 99% sequence identity to SEQ ID NO: 499. In some embodiments, the polypeptide having protease activity comprises an amino acid sequence having at least 50%, at least 60%, at least 70%, at least 80%, at least 81%, at least 82%, at least 83%, at least 84%, at least 85%, at least 86%, at least 87%, at least 88%, at least 89%, at least 90%, at least 91%, at least 92%, at least 93%, at least 94%, at least 95%, at least 96%, at least 97%, at least 98%, or at least 99% sequence identity to SEQ ID NO: 500. In some embodiments, the polypeptide having protease activity comprises an amino acid sequence having at least 50%, at least 60%, at least 70%, at least 80%, at least 81%, at least 82%, at least 83%, at least 84%, at least 85%, at least 86%, at least 87%, at least 88%, at least 89%, at least 90%, at least 91%, at least 92%, at least 93%, at least 94%, at least 95%, at least 96%, at least 97%, at least 98%, or at least 99% sequence identity to SEQ ID NO: 501. In some embodiments, the polypeptide having protease activity comprises an amino acid sequence having at least 50%, at least 60%, at least 70%, at least 80%, at least 81%, at least 82%, at least 83%, at least 84%, at least 85%, at least 86%, at least 87%, at least 88%, at least 89%, at least 90%, at least 91%, at least 92%, at least 93%, at least 94%, at least 95%, at least 96%, at least 97%, at least 98%, or at least 99% sequence identity to SEQ ID NO: 502. In some embodiments, the polypeptide having protease activity comprises an amino acid sequence having at least 50%, at least 60%, at least 70%, at least 80%, at least 81%, at least 82%, at least 83%, at least 84%, at least 85%, at least 86%, at least 87%, at least 88%, at least 89%, at least 90%, at least 91%, at least 92%, at least 93%, at least 94%, at least 95%, at least 96%, at least 97%, at least 98%, or at least 99% sequence identity to SEQ ID NO: 503. In some embodiments, the polypeptide having protease activity comprises an amino acid sequence having at least 50%, at least 60%, at least 70%, at least 80%, at least 81%, at least 82%, at least 83%, at least 84%, at least 85%, at least 86%, at least 87%, at least 88%, at least 89%, at least 90%, at least 91%, at least 92%, at least 93%, at least 94%, at least 95%, at least 96%, at least 97%, at least 98%, or at least 99% sequence identity to SEQ ID NO: 504. In some embodiments, the polypeptide having protease activity comprises an amino acid sequence having at least 50%, at least 60%, at least 70%, at least 80%, at least 81%, at least 82%, at least 83%, at least 84%, at least 85%, at least 86%, at least 87%, at least 88%, at least 89%, at least 90%, at least 91%, at least 92%, at least 93%, at least 94%, at least 95%, at least 96%, at least 97%, at least 98%, or at least 99% sequence identity to SEQ ID NO: 505. In some embodiments, the polypeptide having protease activity comprises an amino acid sequence having at least 50%, at least 60%, at least 70%, at least 80%, at least 81%, at least 82%, at least 83%, at least 84%, at least 85%, at least 86%, at least 87%, at least 88%, at least 89%, at least 90%, at least 91%, at least 92%, at least 93%, at least 94%, at least 95%, at least 96%, at least 97%, at least 98%, or at least 99% sequence identity to SEQ ID NO: 506. In some embodiments, the polypeptide having protease activity comprises an amino acid sequence having at least 50%, at least 60%, at least 70%, at least 80%, at least 81%, at least 82%, at least 83%, at least 84%, at least 85%, at least 86%, at least 87%, at least 88%, at least 89%, at least 90%, at least 91%, at least 92%, at least 93%, at least 94%, at least 95%, at least 96%, at least 97%, at least 98%, or at least 99% sequence identity to SEQ ID NO: 507. In some embodiments, the polypeptide having protease activity comprises an amino acid sequence having at least 50%, at least 60%, at least 70%, at least 80%, at least 81%, at least 82%, at least 83%, at least 84%, at least 85%, at least 86%, at least 87%, at least 88%, at least 89%, at least 90%, at least 91%, at least 92%, at least 93%, at least 94%, at least 95%, at least 96%, at least 97%, at least 98%, or at least 99% sequence identity to SEQ ID NO: 508. In some embodiments, the polypeptide having protease activity comprises an amino acid sequence having at least 50%, at least 60%, at least 70%, at least 80%, at least 81%, at least 82%, at least 83%, at least 84%, at least 85%, at least 86%, at least 87%, at least 88%, at least 89%, at least 90%, at least 91%, at least 92%, at least 93%, at least 94%, at least 95%, at least 96%, at least 97%, at least 98%, or at least 99% sequence identity to SEQ ID NO: 509. In some embodiments, the polypeptide having protease activity comprises an amino acid sequence having at least 50%, at least 60%, at least 70%, at least 80%, at least 81%, at least 82%, at least 83%, at least 84%, at least 85%, at least 86%, at least 87%, at least 88%, at least 89%, at least 90%, at least 91%, at least 92%, at least 93%, at least 94%, at least 95%, at least 96%, at least 97%, at least 98%, or at least 99% sequence identity to SEQ ID NO: 510. In some embodiments, the polypeptide having protease activity comprises an amino acid sequence having at least 50%, at least 60%, at least 70%, at least 80%, at least 81%, at least 82%, at least 83%, at least 84%, at least 85%, at least 86%, at least 87%, at least 88%, at least 89%, at least 90%, at least 91%, at least 92%, at least 93%, at least 94%, at least 95%, at least 96%, at least 97%, at least 98%, or at least 99% sequence identity to SEQ ID NO: 511. In some embodiments, the polypeptide having protease activity comprises an amino acid sequence having at least 50%, at least 60%, at least 70%, at least 80%, at least 81%, at least 82%, at least 83%, at least 84%, at least 85%, at least 86%, at least 87%, at least 88%, at least 89%, at least 90%, at least 91%, at least 92%, at least 93%, at least 94%, at least 95%, at least 96%, at least 97%, at least 98%, or at least 99% sequence identity to SEQ ID NO: 512. In some embodiments, the polypeptide having protease activity comprises an amino acid sequence having at least 50%, at least 60%, at least 70%, at least 80%, at least 81%, at least 82%, at least 83%, at least 84%, at least 85%, at least 86%, at least 87%, at least 88%, at least 89%, at least 90%, at least 91%, at least 92%, at least 93%, at least 94%, at least 95%, at least 96%, at least 97%, at least 98%, or at least 99% sequence identity to SEQ ID NO: 513. In some embodiments, the polypeptide having protease activity comprises an amino acid sequence having at least 50%, at least 60%, at least 70%, at least 80%, at least 81%, at least 82%, at least 83%, at least 84%, at least 85%, at least 86%, at least 87%, at least 88%, at least 89%, at least 90%, at least 91%, at least 92%, at least 93%, at least 94%, at least 95%, at least 96%, at least 97%, at least 98%, or at least 99% sequence identity to SEQ ID NO: 514. In some embodiments, the polypeptide having protease activity comprises an amino acid sequence having at least 50%, at least 60%, at least 70%, at least 80%, at least 81%, at least 82%, at least 83%, at least 84%, at least 85%, at least 86%, at least 87%, at least 88%, at least 89%, at least 90%, at least 91%, at least 92%, at least 93%, at least 94%, at least 95%, at least 96%, at least 97%, at least 98%, or at least 99% sequence identity to SEQ ID NO: 515. In some embodiments, the polypeptide having protease activity comprises an amino acid sequence having at least 50%, at least 60%, at least 70%, at least 80%, at least 81%, at least 82%, at least 83%, at least 84%, at least 85%, at least 86%, at least 87%, at least 88%, at least 89%, at least 90%, at least 91%, at least 92%, at least 93%, at least 94%, at least 95%, at least 96%, at least 97%, at least 98%, or at least 99% sequence identity to SEQ ID NO: 516. In some embodiments, the polypeptide having protease activity comprises an amino acid sequence having at least 50%, at least 60%, at least 70%, at least 80%, at least 81%, at least 82%, at least 83%, at least 84%, at least 85%, at least 86%, at least 87%, at least 88%, at least 89%, at least 90%, at least 91%, at least 92%, at least 93%, at least 94%, at least 95%, at least 96%, at least 97%, at least 98%, or at least 99% sequence identity to SEQ ID NO: 517. In some embodiments, the polypeptide having protease activity comprises an amino acid sequence having at least 50%, at least 60%, at least 70%, at least 80%, at least 81%, at least 82%, at least 83%, at least 84%, at least 85%, at least 86%, at least 87%, at least 88%, at least 89%, at least 90%, at least 91%, at least 92%, at least 93%, at least 94%, at least 95%, at least 96%, at least 97%, at least 98%, or at least 99% sequence identity to SEQ ID NO: 518. In some embodiments, the polypeptide having protease activity comprises an amino acid sequence having at least 50%, at least 60%, at least 70%, at least 80%, at least 81%, at least 82%, at least 83%, at least 84%, at least 85%, at least 86%, at least 87%, at least 88%, at least 89%, at least 90%, at least 91%, at least 92%, at least 93%, at least 94%, at least 95%, at least 96%, at least 97%, at least 98%, or at least 99% sequence identity to SEQ ID NO: 519. In some embodiments, the polypeptide having protease activity comprises an amino acid sequence having at least 50%, at least 60%, at least 70%, at least 80%, at least 81%, at least 82%, at least 83%, at least 84%, at least 85%, at least 86%, at least 87%, at least 88%, at least 89%, at least 90%, at least 91%, at least 92%, at least 93%, at least 94%, at least 95%, at least 96%, at least 97%, at least 98%, or at least 99% sequence identity to SEQ ID NO: 520. In some embodiments, the polypeptide having protease activity comprises an amino acid sequence having at least 50%, at least 60%, at least 70%, at least 80%, at least 81%, at least 82%, at least 83%, at least 84%, at least 85%, at least 86%, at least 87%, at least 88%, at least 89%, at least 90%, at least 91%, at least 92%, at least 93%, at least 94%, at least 95%, at least 96%, at least 97%, at least 98%, or at least 99% sequence identity to SEQ ID NO: 521. In some embodiments, the polypeptide having protease activity comprises an amino acid sequence having at least 50%, at least 60%, at least 70%, at least 80%, at least 81%, at least 82%, at least 83%, at least 84%, at least 85%, at least 86%, at least 87%, at least 88%, at least 89%, at least 90%, at least 91%, at least 92%, at least 93%, at least 94%, at least 95%, at least 96%, at least 97%, at least 98%, or at least 99% sequence identity to SEQ ID NO: 522. In some embodiments, the polypeptide having protease activity comprises an amino acid sequence having at least 50%, at least 60%, at least 70%, at least 80%, at least 81%, at least 82%, at least 83%, at least 84%, at least 85%, at least 86%, at least 87%, at least 88%, at least 89%, at least 90%, at least 91%, at least 92%, at least 93%, at least 94%, at least 95%, at least 96%, at least 97%, at least 98%, or at least 99% sequence identity to SEQ ID NO: 523. In some embodiments, the polypeptide having protease activity comprises an amino acid sequence having at least 50%, at least 60%, at least 70%, at least 80%, at least 81%, at least 82%, at least 83%, at least 84%, at least 85%, at least 86%, at least 87%, at least 88%, at least 89%, at least 90%, at least 91%, at least 92%, at least 93%, at least 94%, at least 95%, at least 96%, at least 97%, at least 98%, or at least 99% sequence identity to SEQ ID NO: 524. In some embodiments, the polypeptide having protease activity comprises an amino acid sequence having at least 50%, at least 60%, at least 70%, at least 80%, at least 81%, at least 82%, at least 83%, at least 84%, at least 85%, at least 86%, at least 87%, at least 88%, at least 89%, at least 90%, at least 91%, at least 92%, at least 93%, at least 94%, at least 95%, at least 96%, at least 97%, at least 98%, or at least 99% sequence identity to SEQ ID NO: 525. In some embodiments, the polypeptide having protease activity comprises an amino acid sequence having at least 50%, at least 60%, at least 70%, at least 80%, at least 81%, at least 82%, at least 83%, at least 84%, at least 85%, at least 86%, at least 87%, at least 88%, at least 89%, at least 90%, at least 91%, at least 92%, at least 93%, at least 94%, at least 95%, at least 96%, at least 97%, at least 98%, or at least 99% sequence identity to SEQ ID NO: 526. In some embodiments, the polypeptide having protease activity comprises an amino acid sequence having at least 50%, at least 60%, at least 70%, at least 80%, at least 81%, at least 82%, at least 83%, at least 84%, at least 85%, at least 86%, at least 87%, at least 88%, at least 89%, at least 90%, at least 91%, at least 92%, at least 93%, at least 94%, at least 95%, at least 96%, at least 97%, at least 98%, or at least 99% sequence identity to SEQ ID NO: 527. In some embodiments, the polypeptide having protease activity comprises an amino acid sequence having at least 50%, at least 60%, at least 70%, at least 80%, at least 81%, at least 82%, at least 83%, at least 84%, at least 85%, at least 86%, at least 87%, at least 88%, at least 89%, at least 90%, at least 91%, at least 92%, at least 93%, at least 94%, at least 95%, at least 96%, at least 97%, at least 98%, or at least 99% sequence identity to SEQ ID NO: 528. In some embodiments, the polypeptide having protease activity comprises an amino acid sequence having at least 50%, at least 60%, at least 70%, at least 80%, at least 81%, at least 82%, at least 83%, at least 84%, at least 85%, at least 86%, at least 87%, at least 88%, at least 89%, at least 90%, at least 91%, at least 92%, at least 93%, at least 94%, at least 95%, at least 96%, at least 97%, at least 98%, or at least 99% sequence identity to SEQ ID NO: 737. In some embodiments, the polypeptide having protease activity comprises an amino acid sequence having at least 50%, at least 60%, at least 70%, at least 80%, at least 81%, at least 82%, at least 83%, at least 84%, at least 85%, at least 86%, at least 87%, at least 88%, at least 89%, at least 90%, at least 91%, at least 92%, at least 93%, at least 94%, at least 95%, at least 96%, at least 97%, at least 98%, or at least 99% sequence identity to SEQ ID NO: 745. In some embodiments, the polypeptide having protease activity comprises an amino acid sequence having at least 50%, at least 60%, at least 70%, at least 80%, at least 81%, at least 82%, at least 83%, at least 84%, at least 85%, at least 86%, at least 87%, at least 88%, at least 89%, at least 90%, at least 91%, at least 92%, at least 93%, at least 94%, at least 95%, at least 96%, at least 97%, at least 98%, or at least 99% sequence identity to SEQ ID NO: 746. In some embodiments, the polypeptide having protease activity comprises an amino acid sequence having at least 50%, at least 60%, at least 70%, at least 80%, at least 81%, at least 82%, at least 83%, at least 84%, at least 85%, at least 86%, at least 87%, at least 88%, at least 89%, at least 90%, at least 91%, at least 92%, at least 93%, at least 94%, at least 95%, at least 96%, at least 97%, at least 98%, or at least 99% sequence identity to SEQ ID NO: 747. In some embodiments, the polypeptide having protease activity comprises an amino acid sequence having at least 50%, at least 60%, at least 70%, at least 80%, at least 81%, at least 82%, at least 83%, at least 84%, at least 85%, at least 86%, at least 87%, at least 88%, at least 89%, at least 90%, at least 91%, at least 92%, at least 93%, at least 94%, at least 95%, at least 96%, at least 97%, at least 98%, or at least 99% sequence identity to SEQ ID NO: 748. In some embodiments, the polypeptide having protease activity comprises an amino acid sequence having at least 50%, at least 60%, at least 70%, at least 80%, at least 81%, at least 82%, at least 83%, at least 84%, at least 85%, at least 86%, at least 87%, at least 88%, at least 89%, at least 90%, at least 91%, at least 92%, at least 93%, at least 94%, at least 95%, at least 96%, at least 97%, at least 98%, or at least 99% sequence identity to SEQ ID NO: 749. In some embodiments, the polypeptide having protease activity comprises an amino acid sequence having at least 50%, at least 60%, at least 70%, at least 80%, at least 81%, at least 82%, at least 83%, at least 84%, at least 85%, at least 86%, at least 87%, at least 88%, at least 89%, at least 90%, at least 91%, at least 92%, at least 93%, at least 94%, at least 95%, at least 96%, at least 97%, at least 98%, or at least 99% sequence identity to SEQ ID NO: 750. In some embodiments, the polypeptide having protease activity comprises an amino acid sequence having at least 50%, at least 60%, at least 70%, at least 80%, at least 81%, at least 82%, at least 83%, at least 84%, at least 85%, at least 86%, at least 87%, at least 88%, at least 89%, at least 90%, at least 91%, at least 92%, at least 93%, at least 94%, at least 95%, at least 96%, at least 97%, at least 98%, or at least 99% sequence identity to SEQ ID NO: 751. In some embodiments, the polypeptide having protease activity comprises an amino acid sequence having at least 50%, at least 60%, at least 70%, at least 80%, at least 81%, at least 82%, at least 83%, at least 84%, at least 85%, at least 86%, at least 87%, at least 88%, at least 89%, at least 90%, at least 91%, at least 92%, at least 93%, at least 94%, at least 95%, at least 96%, at least 97%, at least 98%, or at least 99% sequence identity to SEQ ID NO: 752. In some embodiments, the polypeptide having protease activity comprises an amino acid sequence having at least 50%, at least 60%, at least 70%, at least 80%, at least 81%, at least 82%, at least 83%, at least 84%, at least 85%, at least 86%, at least 87%, at least 88%, at least 89%, at least 90%, at least 91%, at least 92%, at least 93%, at least 94%, at least 95%, at least 96%, at least 97%, at least 98%, or at least 99% sequence identity to SEQ ID NO: 753. In some embodiments, the polypeptide having protease activity comprises an amino acid sequence having at least 50%, at least 60%, at least 70%, at least 80%, at least 81%, at least 82%, at least 83%, at least 84%, at least 85%, at least 86%, at least 87%, at least 88%, at least 89%, at least 90%, at least 91%, at least 92%, at least 93%, at least 94%, at least 95%, at least 96%, at least 97%, at least 98%, or at least 99% sequence identity to SEQ ID NO: 754. In some embodiments, the polypeptide having protease activity comprises an amino acid sequence having at least 50%, at least 60%, at least 70%, at least 80%, at least 81%, at least 82%, at least 83%, at least 84%, at least 85%, at least 86%, at least 87%, at least 88%, at least 89%, at least 90%, at least 91%, at least 92%, at least 93%, at least 94%, at least 95%, at least 96%, at least 97%, at least 98%, or at least 99% sequence identity to SEQ ID NO: 755. In some embodiments, the polypeptide having protease activity comprises an amino acid sequence having at least 50%, at least 60%, at least 70%, at least 80%, at least 81%, at least 82%, at least 83%, at least 84%, at least 85%, at least 86%, at least 87%, at least 88%, at least 89%, at least 90%, at least 91%, at least 92%, at least 93%, at least 94%, at least 95%, at least 96%, at least 97%, at least 98%, or at least 99% sequence identity to SEQ ID NO: 756. In some embodiments, the polypeptide having protease activity comprises an amino acid sequence having at least 50%, at least 60%, at least 70%, at least 80%, at least 81%, at least 82%, at least 83%, at least 84%, at least 85%, at least 86%, at least 87%, at least 88%, at least 89%, at least 90%, at least 91%, at least 92%, at least 93%, at least 94%, at least 95%, at least 96%, at least 97%, at least 98%, or at least 99% sequence identity to SEQ ID NO: 757. In some embodiments, the polypeptide having protease activity comprises an amino acid sequence having at least 50%, at least 60%, at least 70%, at least 80%, at least 81%, at least 82%, at least 83%, at least 84%, at least 85%, at least 86%, at least 87%, at least 88%, at least 89%, at least 90%, at least 91%, at least 92%, at least 93%, at least 94%, at least 95%, at least 96%, at least 97%, at least 98%, or at least 99% sequence identity to SEQ ID NO: 758. In some embodiments, the polypeptide having protease activity comprises an amino acid sequence having at least 50%, at least 60%, at least 70%, at least 80%, at least 81%, at least 82%, at least 83%, at least 84%, at least 85%, at least 86%, at least 87%, at least 88%, at least 89%, at least 90%, at least 91%, at least 92%, at least 93%, at least 94%, at least 95%, at least 96%, at least 97%, at least 98%, or at least 99% sequence identity to SEQ ID NO: 759. In some embodiments, the polypeptide having protease activity comprises an amino acid sequence having at least 50%, at least 60%, at least 70%, at least 80%, at least 81%, at least 82%, at least 83%, at least 84%, at least 85%, at least 86%, at least 87%, at least 88%, at least 89%, at least 90%, at least 91%, at least 92%, at least 93%, at least 94%, at least 95%, at least 96%, at least 97%, at least 98%, or at least 99% sequence identity to SEQ ID NO: 760. In some embodiments, the polypeptide having protease activity comprises an amino acid sequence having at least 50%, at least 60%, at least 70%, at least 80%, at least 81%, at least 82%, at least 83%, at least 84%, at least 85%, at least 86%, at least 87%, at least 88%, at least 89%, at least 90%, at least 91%, at least 92%, at least 93%, at least 94%, at least 95%, at least 96%, at least 97%, at least 98%, or at least 99% sequence identity to SEQ ID NO: 761. In some embodiments, the polypeptide having protease activity comprises an amino acid sequence having at least 50%, at least 60%, at least 70%, at least 80%, at least 81%, at least 82%, at least 83%, at least 84%, at least 85%, at least 86%, at least 87%, at least 88%, at least 89%, at least 90%, at least 91%, at least 92%, at least 93%, at least 94%, at least 95%, at least 96%, at least 97%, at least 98%, or at least 99% sequence identity to SEQ ID NO: 762. In some embodiments, the polypeptide having protease activity comprises an amino acid sequence having at least 50%, at least 60%, at least 70%, at least 80%, at least 81%, at least 82%, at least 83%, at least 84%, at least 85%, at least 86%, at least 87%, at least 88%, at least 89%, at least 90%, at least 91%, at least 92%, at least 93%, at least 94%, at least 95%, at least 96%, at least 97%, at least 98%, or at least 99% sequence identity to SEQ ID NO: 763. In some embodiments, the polypeptide having protease activity comprises an amino acid sequence having at least 50%, at least 60%, at least 70%, at least 80%, at least 81%, at least 82%, at least 83%, at least 84%, at least 85%, at least 86%, at least 87%, at least 88%, at least 89%, at least 90%, at least 91%, at least 92%, at least 93%, at least 94%, at least 95%, at least 96%, at least 97%, at least 98%, or at least 99% sequence identity to SEQ ID NO: 764. In some embodiments, the polypeptide having protease activity comprises an amino acid sequence having at least 50%, at least 60%, at least 70%, at least 80%, at least 81%, at least 82%, at least 83%, at least 84%, at least 85%, at least 86%, at least 87%, at least 88%, at least 89%, at least 90%, at least 91%, at least 92%, at least 93%, at least 94%, at least 95%, at least 96%, at least 97%, at least 98%, or at least 99% sequence identity to SEQ ID NO: 765. In some embodiments, the polypeptide having protease activity comprises an amino acid sequence having at least 50%, at least 60%, at least 70%, at least 80%, at least 81%, at least 82%, at least 83%, at least 84%, at least 85%, at least 86%, at least 87%, at least 88%, at least 89%, at least 90%, at least 91%, at least 92%, at least 93%, at least 94%, at least 95%, at least 96%, at least 97%, at least 98%, or at least 99% sequence identity to SEQ ID NO: 766. In some embodiments, the polypeptide having protease activity comprises an amino acid sequence having at least 50%, at least 60%, at least 70%, at least 80%, at least 81%, at least 82%, at least 83%, at least 84%, at least 85%, at least 86%, at least 87%, at least 88%, at least 89%, at least 90%, at least 91%, at least 92%, at least 93%, at least 94%, at least 95%, at least 96%, at least 97%, at least 98%, or at least 99% sequence identity to SEQ ID NO: 767. In some embodiments, the polypeptide having protease activity comprises an amino acid sequence having at least 50%, at least 60%, at least 70%, at least 80%, at least 81%, at least 82%, at least 83%, at least 84%, at least 85%, at least 86%, at least 87%, at least 88%, at least 89%, at least 90%, at least 91%, at least 92%, at least 93%, at least 94%, at least 95%, at least 96%, at least 97%, at least 98%, or at least 99% sequence identity to SEQ ID NO: 768. In some embodiments, the polypeptide having protease activity comprises an amino acid sequence having at least 50%, at least 60%, at least 70%, at least 80%, at least 81%, at least 82%, at least 83%, at least 84%, at least 85%, at least 86%, at least 87%, at least 88%, at least 89%, at least 90%, at least 91%, at least 92%, at least 93%, at least 94%, at least 95%, at least 96%, at least 97%, at least 98%, or at least 99% sequence identity to SEQ ID NO: 769. In some embodiments, the polypeptide having protease activity comprises an amino acid sequence having at least 50%, at least 60%, at least 70%, at least 80%, at least 81%, at least 82%, at least 83%, at least 84%, at least 85%, at least 86%, at least 87%, at least 88%, at least 89%, at least 90%, at least 91%, at least 92%, at least 93%, at least 94%, at least 95%, at least 96%, at least 97%, at least 98%, or at least 99% sequence identity to SEQ ID NO: 770. In some embodiments, the polypeptide having protease activity comprises an amino acid sequence having at least 50%, at least 60%, at least 70%, at least 80%, at least 81%, at least 82%, at least 83%, at least 84%, at least 85%, at least 86%, at least 87%, at least 88%, at least 89%, at least 90%, at least 91%, at least 92%, at least 93%, at least 94%, at least 95%, at least 96%, at least 97%, at least 98%, or at least 99% sequence identity to SEQ ID NO: 771. In some embodiments, the polypeptide having protease activity comprises an amino acid sequence having at least 50%, at least 60%, at least 70%, at least 80%, at least 81%, at least 82%, at least 83%, at least 84%, at least 85%, at least 86%, at least 87%, at least 88%, at least 89%, at least 90%, at least 91%, at least 92%, at least 93%, at least 94%, at least 95%, at least 96%, at least 97%, at least 98%, or at least 99% sequence identity to SEQ ID NO: 772. In some embodiments, the polypeptide having protease activity comprises an amino acid sequence having at least 50%, at least 60%, at least 70%, at least 80%, at least 81%, at least 82%, at least 83%, at least 84%, at least 85%, at least 86%, at least 87%, at least 88%, at least 89%, at least 90%, at least 91%, at least 92%, at least 93%, at least 94%, at least 95%, at least 96%, at least 97%, at least 98%, or at least 99% sequence identity to SEQ ID NO: 773. In some embodiments, the polypeptide having protease activity comprises an amino acid sequence having at least 50%, at least 60%, at least 70%, at least 80%, at least 81%, at least 82%, at least 83%, at least 84%, at least 85%, at least 86%, at least 87%, at least 88%, at least 89%, at least 90%, at least 91%, at least 92%, at least 93%, at least 94%, at least 95%, at least 96%, at least 97%, at least 98%, or at least 99% sequence identity to SEQ ID NO: 774. In some embodiments, the polypeptide having protease activity comprises an amino acid sequence having at least 50%, at least 60%, at least 70%, at least 80%, at least 81%, at least 82%, at least 83%, at least 84%, at least 85%, at least 86%, at least 87%, at least 88%, at least 89%, at least 90%, at least 91%, at least 92%, at least 93%, at least 94%, at least 95%, at least 96%, at least 97%, at least 98%, or at least 99% sequence identity to SEQ ID NO: 775. In some embodiments, the polypeptide having protease activity comprises an amino acid sequence having at least 50%, at least 60%, at least 70%, at least 80%, at least 81%, at least 82%, at least 83%, at least 84%, at least 85%, at least 86%, at least 87%, at least 88%, at least 89%, at least 90%, at least 91%, at least 92%, at least 93%, at least 94%, at least 95%, at least 96%, at least 97%, at least 98%, or at least 99% sequence identity to SEQ ID NO: 776. In some embodiments, the polypeptide having protease activity comprises an amino acid sequence having at least 50%, at least 60%, at least 70%, at least 80%, at least 81%, at least 82%, at least 83%, at least 84%, at least 85%, at least 86%, at least 87%, at least 88%, at least 89%, at least 90%, at least 91%, at least 92%, at least 93%, at least 94%, at least 95%, at least 96%, at least 97%, at least 98%, or at least 99% sequence identity to SEQ ID NO: 777. In some embodiments, the polypeptide having protease activity comprises an amino acid sequence having at least 50%, at least 60%, at least 70%, at least 80%, at least 81%, at least 82%, at least 83%, at least 84%, at least 85%, at least 86%, at least 87%, at least 88%, at least 89%, at least 90%, at least 91%, at least 92%, at least 93%, at least 94%, at least 95%, at least 96%, at least 97%, at least 98%, or at least 99% sequence identity to SEQ ID NO: 778. In some embodiments, the polypeptide having protease activity comprises an amino acid sequence having at least 50%, at least 60%, at least 70%, at least 80%, at least 81%, at least 82%, at least 83%, at least 84%, at least 85%, at least 86%, at least 87%, at least 88%, at least 89%, at least 90%, at least 91%, at least 92%, at least 93%, at least 94%, at least 95%, at least 96%, at least 97%, at least 98%, or at least 99% sequence identity to SEQ ID NO: 779. In some embodiments, the polypeptide having protease activity comprises an amino acid sequence having at least 50%, at least 60%, at least 70%, at least 80%, at least 81%, at least 82%, at least 83%, at least 84%, at least 85%, at least 86%, at least 87%, at least 88%, at least 89%, at least 90%, at least 91%, at least 92%, at least 93%, at least 94%, at least 95%, at least 96%, at least 97%, at least 98%, or at least 99% sequence identity to SEQ ID NO: 780. In some embodiments, the polypeptide having protease activity comprises an amino acid sequence having at least 50%, at least 60%, at least 70%, at least 80%, at least 81%, at least 82%, at least 83%, at least 84%, at least 85%, at least 86%, at least 87%, at least 88%, at least 89%, at least 90%, at least 91%, at least 92%, at least 93%, at least 94%, at least 95%, at least 96%, at least 97%, at least 98%, or at least 99% sequence identity to SEQ ID NO: 781. In some embodiments, the polypeptide having protease activity comprises an amino acid sequence having at least 50%, at least 60%, at least 70%, at least 80%, at least 81%, at least 82%, at least 83%, at least 84%, at least 85%, at least 86%, at least 87%, at least 88%, at least 89%, at least 90%, at least 91%, at least 92%, at least 93%, at least 94%, at least 95%, at least 96%, at least 97%, at least 98%, or at least 99% sequence identity to SEQ ID NO: 782. In some embodiments, the polypeptide having protease activity comprises an amino acid sequence having at least 50%, at least 60%, at least 70%, at least 80%, at least 81%, at least 82%, at least 83%, at least 84%, at least 85%, at least 86%, at least 87%, at least 88%, at least 89%, at least 90%, at least 91%, at least 92%, at least 93%, at least 94%, at least 95%, at least 96%, at least 97%, at least 98%, or at least 99% sequence identity to SEQ ID NO: 783. In some embodiments, the polypeptide having protease activity comprises an amino acid sequence having at least 50%, at least 60%, at least 70%, at least 80%, at least 81%, at least 82%, at least 83%, at least 84%, at least 85%, at least 86%, at least 87%, at least 88%, at least 89%, at least 90%, at least 91%, at least 92%, at least 93%, at least 94%, at least 95%, at least 96%, at least 97%, at least 98%, or at least 99% sequence identity to SEQ ID NO: 784. In some embodiments, the polypeptide having protease activity comprises an amino acid sequence having at least 50%, at least 60%, at least 70%, at least 80%, at least 81%, at least 82%, at least 83%, at least 84%, at least 85%, at least 86%, at least 87%, at least 88%, at least 89%, at least 90%, at least 91%, at least 92%, at least 93%, at least 94%, at least 95%, at least 96%, at least 97%, at least 98%, or at least 99% sequence identity to SEQ ID NO: 785. In some embodiments, the polypeptide having protease activity comprises an amino acid sequence having at least 50%, at least 60%, at least 70%, at least 80%, at least 81%, at least 82%, at least 83%, at least 84%, at least 85%, at least 86%, at least 87%, at least 88%, at least 89%, at least 90%, at least 91%, at least 92%, at least 93%, at least 94%, at least 95%, at least 96%, at least 97%, at least 98%, or at least 99% sequence identity to SEQ ID NO: 786. In some embodiments, the polypeptide having protease activity comprises an amino acid sequence having at least 50%, at least 60%, at least 70%, at least 80%, at least 81%, at least 82%, at least 83%, at least 84%, at least 85%, at least 86%, at least 87%, at least 88%, at least 89%, at least 90%, at least 91%, at least 92%, at least 93%, at least 94%, at least 95%, at least 96%, at least 97%, at least 98%, or at least 99% sequence identity to SEQ ID NO: 787. In some embodiments, the polypeptide having protease activity comprises an amino acid sequence having at least 50%, at least 60%, at least 70%, at least 80%, at least 81%, at least 82%, at least 83%, at least 84%, at least 85%, at least 86%, at least 87%, at least 88%, at least 89%, at least 90%, at least 91%, at least 92%, at least 93%, at least 94%, at least 95%, at least 96%, at least 97%, at least 98%, or at least 99% sequence identity to SEQ ID NO: 788. In some embodiments, the polypeptide having protease activity comprises an amino acid sequence having at least 50%, at least 60%, at least 70%, at least 80%, at least 81%, at least 82%, at least 83%, at least 84%, at least 85%, at least 86%, at least 87%, at least 88%, at least 89%, at least 90%, at least 91%, at least 92%, at least 93%, at least 94%, at least 95%, at least 96%, at least 97%, at least 98%, or at least 99% sequence identity to SEQ ID NO: 789. In some embodiments, the polypeptide having protease activity comprises an amino acid sequence having at least 50%, at least 60%, at least 70%, at least 80%, at least 81%, at least 82%, at least 83%, at least 84%, at least 85%, at least 86%, at least 87%, at least 88%, at least 89%, at least 90%, at least 91%, at least 92%, at least 93%, at least 94%, at least 95%, at least 96%, at least 97%, at least 98%, or at least 99% sequence identity to SEQ ID NO: 790. In some embodiments, the polypeptide having protease activity comprises an amino acid sequence having at least 50%, at least 60%, at least 70%, at least 80%, at least 81%, at least 82%, at least 83%, at least 84%, at least 85%, at least 86%, at least 87%, at least 88%, at least 89%, at least 90%, at least 91%, at least 92%, at least 93%, at least 94%, at least 95%, at least 96%, at least 97%, at least 98%, or at least 99% sequence identity to SEQ ID NO: 791. In some embodiments, the polypeptide having protease activity comprises an amino acid sequence having at least 50%, at least 60%, at least 70%, at least 80%, at least 81%, at least 82%, at least 83%, at least 84%, at least 85%, at least 86%, at least 87%, at least 88%, at least 89%, at least 90%, at least 91%, at least 92%, at least 93%, at least 94%, at least 95%, at least 96%, at least 97%, at least 98%, or at least 99% sequence identity to SEQ ID NO: 792. In some embodiments, the polypeptide having protease activity comprises an amino acid sequence having at least 50%, at least 60%, at least 70%, at least 80%, at least 81%, at least 82%, at least 83%, at least 84%, at least 85%, at least 86%, at least 87%, at least 88%, at least 89%, at least 90%, at least 91%, at least 92%, at least 93%, at least 94%, at least 95%, at least 96%, at least 97%, at least 98%, or at least 99% sequence identity to SEQ ID NO: 793. In some embodiments, the polypeptide having protease activity comprises an amino acid sequence having at least 50%, at least 60%, at least 70%, at least 80%, at least 81%, at least 82%, at least 83%, at least 84%, at least 85%, at least 86%, at least 87%, at least 88%, at least 89%, at least 90%, at least 91%, at least 92%, at least 93%, at least 94%, at least 95%, at least 96%, at least 97%, at least 98%, or at least 99% sequence identity to SEQ ID NO: 794. In some embodiments, the polypeptide having protease activity comprises an amino acid sequence having at least 50%, at least 60%, at least 70%, at least 80%, at least 81%, at least 82%, at least 83%, at least 84%, at least 85%, at least 86%, at least 87%, at least 88%, at least 89%, at least 90%, at least 91%, at least 92%, at least 93%, at least 94%, at least 95%, at least 96%, at least 97%, at least 98%, or at least 99% sequence identity to SEQ ID NO: 795. In some embodiments, the polypeptide having protease activity comprises an amino acid sequence having at least 50%, at least 60%, at least 70%, at least 80%, at least 81%, at least 82%, at least 83%, at least 84%, at least 85%, at least 86%, at least 87%, at least 88%, at least 89%, at least 90%, at least 91%, at least 92%, at least 93%, at least 94%, at least 95%, at least 96%, at least 97%, at least 98%, or at least 99% sequence identity to SEQ ID NO: 796. In some embodiments, the polypeptide having protease activity comprises an amino acid sequence having at least 50%, at least 60%, at least 70%, at least 80%, at least 81%, at least 82%, at least 83%, at least 84%, at least 85%, at least 86%, at least 87%, at least 88%, at least 89%, at least 90%, at least 91%, at least 92%, at least 93%, at least 94%, at least 95%, at least 96%, at least 97%, at least 98%, or at least 99% sequence identity to SEQ ID NO: 797. In some embodiments, the polypeptide having protease activity comprises an amino acid sequence having at least 50%, at least 60%, at least 70%, at least 80%, at least 81%, at least 82%, at least 83%, at least 84%, at least 85%, at least 86%, at least 87%, at least 88%, at least 89%, at least 90%, at least 91%, at least 92%, at least 93%, at least 94%, at least 95%, at least 96%, at least 97%, at least 98%, or at least 99% sequence identity to SEQ ID NO: 798. In some embodiments, the polypeptide having protease activity comprises an amino acid sequence having at least 50%, at least 60%, at least 70%, at least 80%, at least 81%, at least 82%, at least 83%, at least 84%, at least 85%, at least 86%, at least 87%, at least 88%, at least 89%, at least 90%, at least 91%, at least 92%, at least 93%, at least 94%, at least 95%, at least 96%, at least 97%, at least 98%, or at least 99% sequence identity to SEQ ID NO: 799. In some embodiments, the polypeptide having protease activity comprises an amino acid sequence having at least 50%, at least 60%, at least 70%, at least 80%, at least 81%, at least 82%, at least 83%, at least 84%, at least 85%, at least 86%, at least 87%, at least 88%, at least 89%, at least 90%, at least 91%, at least 92%, at least 93%, at least 94%, at least 95%, at least 96%, at least 97%, at least 98%, or at least 99% sequence identity to SEQ ID NO: 800. In some embodiments, the polypeptide having protease activity comprises an amino acid sequence having at least 50%, at least 60%, at least 70%, at least 80%, at least 81%, at least 82%, at least 83%, at least 84%, at least 85%, at least 86%, at least 87%, at least 88%, at least 89%, at least 90%, at least 91%, at least 92%, at least 93%, at least 94%, at least 95%, at least 96%, at least 97%, at least 98%, or at least 99% sequence identity to SEQ ID NO: 801. In some embodiments, the polypeptide having protease activity comprises an amino acid sequence having at least 50%, at least 60%, at least 70%, at least 80%, at least 81%, at least 82%, at least 83%, at least 84%, at least 85%, at least 86%, at least 87%, at least 88%, at least 89%, at least 90%, at least 91%, at least 92%, at least 93%, at least 94%, at least 95%, at least 96%, at least 97%, at least 98%, or at least 99% sequence identity to SEQ ID NO: 802. In some embodiments, the polypeptide having protease activity comprises an amino acid sequence having at least 50%, at least 60%, at least 70%, at least 80%, at least 81%, at least 82%, at least 83%, at least 84%, at least 85%, at least 86%, at least 87%, at least 88%, at least 89%, at least 90%, at least 91%, at least 92%, at least 93%, at least 94%, at least 95%, at least 96%, at least 97%, at least 98%, or at least 99% sequence identity to SEQ ID NO: 803. In some embodiments, the polypeptide having protease activity comprises an amino acid sequence having at least 50%, at least 60%, at least 70%, at least 80%, at least 81%, at least 82%, at least 83%, at least 84%, at least 85%, at least 86%, at least 87%, at least 88%, at least 89%, at least 90%, at least 91%, at least 92%, at least 93%, at least 94%, at least 95%, at least 96%, at least 97%, at least 98%, or at least 99% sequence identity to SEQ ID NO: 804. In some embodiments, the polypeptide having protease activity comprises an amino acid sequence having at least 50%, at least 60%, at least 70%, at least 80%, at least 81%, at least 82%, at least 83%, at least 84%, at least 85%, at least 86%, at least 87%, at least 88%, at least 89%, at least 90%, at least 91%, at least 92%, at least 93%, at least 94%, at least 95%, at least 96%, at least 97%, at least 98%, or at least 99% sequence identity to SEQ ID NO: 805. In some embodiments, the polypeptide having protease activity comprises an amino acid sequence having at least 50%, at least 60%, at least 70%, at least 80%, at least 81%, at least 82%, at least 83%, at least 84%, at least 85%, at least 86%, at least 87%, at least 88%, at least 89%, at least 90%, at least 91%, at least 92%, at least 93%, at least 94%, at least 95%, at least 96%, at least 97%, at least 98%, or at least 99% sequence identity to SEQ ID NO: 806. In some embodiments, the polypeptide having protease activity comprises an amino acid sequence having at least 50%, at least 60%, at least 70%, at least 80%, at least 81%, at least 82%, at least 83%, at least 84%, at least 85%, at least 86%, at least 87%, at least 88%, at least 89%, at least 90%, at least 91%, at least 92%, at least 93%, at least 94%, at least 95%, at least 96%, at least 97%, at least 98%, or at least 99% sequence identity to SEQ ID NO: 807. In some embodiments, the polypeptide having protease activity comprises an amino acid sequence having at least 50%, at least 60%, at least 70%, at least 80%, at least 81%, at least 82%, at least 83%, at least 84%, at least 85%, at least 86%, at least 87%, at least 88%, at least 89%, at least 90%, at least 91%, at least 92%, at least 93%, at least 94%, at least 95%, at least 96%, at least 97%, at least 98%, or at least 99% sequence identity to SEQ ID NO: 808. In some embodiments, the polypeptide having protease activity comprises an amino acid sequence having at least 50%, at least 60%, at least 70%, at least 80%, at least 81%, at least 82%, at least 83%, at least 84%, at least 85%, at least 86%, at least 87%, at least 88%, at least 89%, at least 90%, at least 91%, at least 92%, at least 93%, at least 94%, at least 95%, at least 96%, at least 97%, at least 98%, or at least 99% sequence identity to SEQ ID NO: 809. In some embodiments, the polypeptide having protease activity comprises an amino acid sequence having at least 50%, at least 60%, at least 70%, at least 80%, at least 81%, at least 82%, at least 83%, at least 84%, at least 85%, at least 86%, at least 87%, at least 88%, at least 89%, at least 90%, at least 91%, at least 92%, at least 93%, at least 94%, at least 95%, at least 96%, at least 97%, at least 98%, or at least 99% sequence identity to SEQ ID NO: 810. In some embodiments, the polypeptide having protease activity comprises an amino acid sequence having at least 50%, at least 60%, at least 70%, at least 80%, at least 81%, at least 82%, at least 83%, at least 84%, at least 85%, at least 86%, at least 87%, at least 88%, at least 89%, at least 90%, at least 91%, at least 92%, at least 93%, at least 94%, at least 95%, at least 96%, at least 97%, at least 98%, or at least 99% sequence identity to SEQ ID NO: 811. In some embodiments, the polypeptide having protease activity comprises an amino acid sequence having at least 50%, at least 60%, at least 70%, at least 80%, at least 81%, at least 82%, at least 83%, at least 84%, at least 85%, at least 86%, at least 87%, at least 88%, at least 89%, at least 90%, at least 91%, at least 92%, at least 93%, at least 94%, at least 95%, at least 96%, at least 97%, at least 98%, or at least 99% sequence identity to SEQ ID NO: 812. In some embodiments, the polypeptide having protease activity comprises an amino acid sequence having at least 50%, at least 60%, at least 70%, at least 80%, at least 81%, at least 82%, at least 83%, at least 84%, at least 85%, at least 86%, at least 87%, at least 88%, at least 89%, at least 90%, at least 91%, at least 92%, at least 93%, at least 94%, at least 95%, at least 96%, at least 97%, at least 98%, or at least 99% sequence identity to SEQ ID NO: 813. In some embodiments, the polypeptide having protease activity comprises an amino acid sequence having at least 50%, at least 60%, at least 70%, at least 80%, at least 81%, at least 82%, at least 83%, at least 84%, at least 85%, at least 86%, at least 87%, at least 88%, at least 89%, at least 90%, at least 91%, at least 92%, at least 93%, at least 94%, at least 95%, at least 96%, at least 97%, at least 98%, or at least 99% sequence identity to SEQ ID NO: 814. In some embodiments, the polypeptide having protease activity comprises an amino acid sequence having at least 50%, at least 60%, at least 70%, at least 80%, at least 81%, at least 82%, at least 83%, at least 84%, at least 85%, at least 86%, at least 87%, at least 88%, at least 89%, at least 90%, at least 91%, at least 92%, at least 93%, at least 94%, at least 95%, at least 96%, at least 97%, at least 98%, or at least 99% sequence identity to SEQ ID NO: 815. In some embodiments, the polypeptide having protease activity comprises an amino acid sequence having at least 50%, at least 60%, at least 70%, at least 80%, at least 81%, at least 82%, at least 83%, at least 84%, at least 85%, at least 86%, at least 87%, at least 88%, at least 89%, at least 90%, at least 91%, at least 92%, at least 93%, at least 94%, at least 95%, at least 96%, at least 97%, at least 98%, or at least 99% sequence identity to SEQ ID NO: 816. In some embodiments, the polypeptide having protease activity comprises an amino acid sequence having at least 50%, at least 60%, at least 70%, at least 80%, at least 81%, at least 82%, at least 83%, at least 84%, at least 85%, at least 86%, at least 87%, at least 88%, at least 89%, at least 90%, at least 91%, at least 92%, at least 93%, at least 94%, at least 95%, at least 96%, at least 97%, at least 98%, or at least 99% sequence identity to SEQ ID NO: 817. In some embodiments, the polypeptide having protease activity comprises an amino acid sequence having at least 50%, at least 60%, at least 70%, at least 80%, at least 81%, at least 82%, at least 83%, at least 84%, at least 85%, at least 86%, at least 87%, at least 88%, at least 89%, at least 90%, at least 91%, at least 92%, at least 93%, at least 94%, at least 95%, at least 96%, at least 97%, at least 98%, or at least 99% sequence identity to SEQ ID NO: 818. In some embodiments, the polypeptide having protease activity comprises an amino acid sequence having at least 50%, at least 60%, at least 70%, at least 80%, at least 81%, at least 82%, at least 83%, at least 84%, at least 85%, at least 86%, at least 87%, at least 88%, at least 89%, at least 90%, at least 91%, at least 92%, at least 93%, at least 94%, at least 95%, at least 96%, at least 97%, at least 98%, or at least 99% sequence identity to SEQ ID NO: 819. In some embodiments, the polypeptide having protease activity comprises an amino acid sequence having at least 50%, at least 60%, at least 70%, at least 80%, at least 81%, at least 82%, at least 83%, at least 84%, at least 85%, at least 86%, at least 87%, at least 88%, at least 89%, at least 90%, at least 91%, at least 92%, at least 93%, at least 94%, at least 95%, at least 96%, at least 97%, at least 98%, or at least 99% sequence identity to SEQ ID NO: 820. In some embodiments, the polypeptide having protease activity comprises an amino acid sequence having at least 50%, at least 60%, at least 70%, at least 80%, at least 81%, at least 82%, at least 83%, at least 84%, at least 85%, at least 86%, at least 87%, at least 88%, at least 89%, at least 90%, at least 91%, at least 92%, at least 93%, at least 94%, at least 95%, at least 96%, at least 97%, at least 98%, or at least 99% sequence identity to SEQ ID NO: 821. In some embodiments, the polypeptide having protease activity comprises an amino acid sequence having at least 50%, at least 60%, at least 70%, at least 80%, at least 81%, at least 82%, at least 83%, at least 84%, at least 85%, at least 86%, at least 87%, at least 88%, at least 89%, at least 90%, at least 91%, at least 92%, at least 93%, at least 94%, at least 95%, at least 96%, at least 97%, at least 98%, or at least 99% sequence identity to SEQ ID NO: 822. In some embodiments, the polypeptide having protease activity comprises an amino acid sequence having at least 50%, at least 60%, at least 70%, at least 80%, at least 81%, at least 82%, at least 83%, at least 84%, at least 85%, at least 86%, at least 87%, at least 88%, at least 89%, at least 90%, at least 91%, at least 92%, at least 93%, at least 94%, at least 95%, at least 96%, at least 97%, at least 98%, or at least 99% sequence identity to SEQ ID NO: 823. In some embodiments, the polypeptide having protease activity comprises an amino acid sequence having at least 50%, at least 60%, at least 70%, at least 80%, at least 81%, at least 82%, at least 83%, at least 84%, at least 85%, at least 86%, at least 87%, at least 88%, at least 89%, at least 90%, at least 91%, at least 92%, at least 93%, at least 94%, at least 95%, at least 96%, at least 97%, at least 98%, or at least 99% sequence identity to SEQ ID NO: 828. In some embodiments, the polypeptide having protease activity comprises an amino acid sequence having at least 50%, at least 60%, at least 70%, at least 80%, at least 81%, at least 82%, at least 83%, at least 84%, at least 85%, at least 86%, at least 87%, at least 88%, at least 89%, at least 90%, at least 91%, at least 92%, at least 93%, at least 94%, at least 95%, at least 96%, at least 97%, at least 98%, or at least 99% sequence identity to SEQ ID NO: 829. In some embodiments, the polypeptide having protease activity comprises an amino acid sequence having at least 50%, at least 60%, at least 70%, at least 80%, at least 81%, at least 82%, at least 83%, at least 84%, at least 85%, at least 86%, at least 87%, at least 88%, at least 89%, at least 90%, at least 91%, at least 92%, at least 93%, at least 94%, at least 95%, at least 96%, at least 97%, at least 98%, or at least 99% sequence identity to SEQ ID NO: 830. In some embodiments, the polypeptide having protease activity comprises an amino acid sequence having at least 50%, at least 60%, at least 70%, at least 80%, at least 81%, at least 82%, at least 83%, at least 84%, at least 85%, at least 86%, at least 87%, at least 88%, at least 89%, at least 90%, at least 91%, at least 92%, at least 93%, at least 94%, at least 95%, at least 96%, at least 97%, at least 98%, or at least 99% sequence identity to SEQ ID NO: 831. In some embodiments, the polypeptide having protease activity comprises an amino acid sequence having at least 50%, at least 60%, at least 70%, at least 80%, at least 81%, at least 82%, at least 83%, at least 84%, at least 85%, at least 86%, at least 87%, at least 88%, at least 89%, at least 90%, at least 91%, at least 92%, at least 93%, at least 94%, at least 95%, at least 96%, at least 97%, at least 98%, or at least 99% sequence identity to SEQ ID NO: 832. In some embodiments, the polypeptide having protease activity comprises an amino acid sequence having at least 50%, at least 60%, at least 70%, at least 80%, at least 81%, at least 82%, at least 83%, at least 84%, at least 85%, at least 86%, at least 87%, at least 88%, at least 89%, at least 90%, at least 91%, at least 92%, at least 93%, at least 94%, at least 95%, at least 96%, at least 97%, at least 98%, or at least 99% sequence identity to SEQ ID NO: 833. In some embodiments, the polypeptide having protease activity comprises an amino acid sequence having at least 50%, at least 60%, at least 70%, at least 80%, at least 81%, at least 82%, at least 83%, at least 84%, at least 85%, at least 86%, at least 87%, at least 88%, at least 89%, at least 90%, at least 91%, at least 92%, at least 93%, at least 94%, at least 95%, at least 96%, at least 97%, at least 98%, or at least 99% sequence identity to SEQ ID NO: 834. In some embodiments, the polypeptide having protease activity comprises an amino acid sequence having at least 50%, at least 60%, at least 70%, at least 80%, at least 81%, at least 82%, at least 83%, at least 84%, at least 85%, at least 86%, at least 87%, at least 88%, at least 89%, at least 90%, at least 91%, at least 92%, at least 93%, at least 94%, at least 95%, at least 96%, at least 97%, at least 98%, or at least 99% sequence identity to SEQ ID NO: 835. In some embodiments, the polypeptide having protease activity comprises an amino acid sequence having at least 50%, at least 60%, at least 70%, at least 80%, at least 81%, at least 82%, at least 83%, at least 84%, at least 85%, at least 86%, at least 87%, at least 88%, at least 89%, at least 90%, at least 91%, at least 92%, at least 93%, at least 94%, at least 95%, at least 96%, at least 97%, at least 98%, or at least 99% sequence identity to SEQ ID NO: 836. In some embodiments, the polypeptide having protease activity comprises an amino acid sequence having at least 50%, at least 60%, at least 70%, at least 80%, at least 81%, at least 82%, at least 83%, at least 84%, at least 85%, at least 86%, at least 87%, at least 88%, at least 89%, at least 90%, at least 91%, at least 92%, at least 93%, at least 94%, at least 95%, at least 96%, at least 97%, at least 98%, or at least 99% sequence identity to SEQ ID NO: 837. In some embodiments, the polypeptide having protease activity comprises an amino acid sequence having at least 50%, at least 60%, at least 70%, at least 80%, at least 81%, at least 82%, at least 83%, at least 84%, at least 85%, at least 86%, at least 87%, at least 88%, at least 89%, at least 90%, at least 91%, at least 92%, at least 93%, at least 94%, at least 95%, at least 96%, at least 97%, at least 98%, or at least 99% sequence identity to SEQ ID NO: 838. In some embodiments, the polypeptide having protease activity comprises an amino acid sequence having at least 50%, at least 60%, at least 70%, at least 80%, at least 81%, at least 82%, at least 83%, at least 84%, at least 85%, at least 86%, at least 87%, at least 88%, at least 89%, at least 90%, at least 91%, at least 92%, at least 93%, at least 94%, at least 95%, at least 96%, at least 97%, at least 98%, or at least 99% sequence identity to SEQ ID NO: 839. In some embodiments, the polypeptide having protease activity comprises an amino acid sequence having at least 50%, at least 60%, at least 70%, at least 80%, at least 81%, at least 82%, at least 83%, at least 84%, at least 85%, at least 86%, at least 87%, at least 88%, at least 89%, at least 90%, at least 91%, at least 92%, at least 93%, at least 94%, at least 95%, at least 96%, at least 97%, at least 98%, or at least 99% sequence identity to SEQ ID NO: 840. In some embodiments, the polypeptide having protease activity comprises an amino acid sequence having at least 50%, at least 60%, at least 70%, at least 80%, at least 81%, at least 82%, at least 83%, at least 84%, at least 85%, at least 86%, at least 87%, at least 88%, at least 89%, at least 90%, at least 91%, at least 92%, at least 93%, at least 94%, at least 95%, at least 96%, at least 97%, at least 98%, or at least 99% sequence identity to SEQ ID NO: 841. In some embodiments, the polypeptide having protease activity comprises an amino acid sequence having at least 50%, at least 60%, at least 70%, at least 80%, at least 81%, at least 82%, at least 83%, at least 84%, at least 85%, at least 86%, at least 87%, at least 88%, at least 89%, at least 90%, at least 91%, at least 92%, at least 93%, at least 94%, at least 95%, at least 96%, at least 97%, at least 98%, or at least 99% sequence identity to SEQ ID NO: 842. In some embodiments, the polypeptide having protease activity comprises an amino acid sequence having at least 50%, at least 60%, at least 70%, at least 80%, at least 81%, at least 82%, at least 83%, at least 84%, at least 85%, at least 86%, at least 87%, at least 88%, at least 89%, at least 90%, at least 91%, at least 92%, at least 93%, at least 94%, at least 95%, at least 96%, at least 97%, at least 98%, or at least 99% sequence identity to SEQ ID NO: 843. In some embodiments, the polypeptide having protease activity comprises an amino acid sequence having at least 50%, at least 60%, at least 70%, at least 80%, at least 81%, at least 82%, at least 83%, at least 84%, at least 85%, at least 86%, at least 87%, at least 88%, at least 89%, at least 90%, at least 91%, at least 92%, at least 93%, at least 94%, at least 95%, at least 96%, at least 97%, at least 98%, or at least 99% sequence identity to SEQ ID NO: 844. In some embodiments, the polypeptide having protease activity comprises an amino acid sequence having at least 50%, at least 60%, at least 70%, at least 80%, at least 81%, at least 82%, at least 83%, at least 84%, at least 85%, at least 86%, at least 87%, at least 88%, at least 89%, at least 90%, at least 91%, at least 92%, at least 93%, at least 94%, at least 95%, at least 96%, at least 97%, at least 98%, or at least 99% sequence identity to SEQ ID NO: 845. In some embodiments, the polypeptide having protease activity comprises an amino acid sequence having at least 50%, at least 60%, at least 70%, at least 80%, at least 81%, at least 82%, at least 83%, at least 84%, at least 85%, at least 86%, at least 87%, at least 88%, at least 89%, at least 90%, at least 91%, at least 92%, at least 93%, at least 94%, at least 95%, at least 96%, at least 97%, at least 98%, or at least 99% sequence identity to SEQ ID NO: 846. In some embodiments, the polypeptide having protease activity comprises an amino acid sequence having at least 50%, at least 60%, at least 70%, at least 80%, at least 81%, at least 82%, at least 83%, at least 84%, at least 85%, at least 86%, at least 87%, at least 88%, at least 89%, at least 90%, at least 91%, at least 92%, at least 93%, at least 94%, at least 95%, at least 96%, at least 97%, at least 98%, or at least 99% sequence identity to SEQ ID NO: 847. In some embodiments, the polypeptide having protease activity comprises an amino acid sequence having at least 50%, at least 60%, at least 70%, at least 80%, at least 81%, at least 82%, at least 83%, at least 84%, at least 85%, at least 86%, at least 87%, at least 88%, at least 89%, at least 90%, at least 91%, at least 92%, at least 93%, at least 94%, at least 95%, at least 96%, at least 97%, at least 98%, or at least 99% sequence identity to SEQ ID NO: 848. In some embodiments, the polypeptide having protease activity comprises an amino acid sequence having at least 50%, at least 60%, at least 70%, at least 80%, at least 81%, at least 82%, at least 83%, at least 84%, at least 85%, at least 86%, at least 87%, at least 88%, at least 89%, at least 90%, at least 91%, at least 92%, at least 93%, at least 94%, at least 95%, at least 96%, at least 97%, at least 98%, or at least 99% sequence identity to SEQ ID NO: 849. In some embodiments, the polypeptide having protease activity comprises an amino acid sequence having at least 50%, at least 60%, at least 70%, at least 80%, at least 81%, at least 82%, at least 83%, at least 84%, at least 85%, at least 86%, at least 87%, at least 88%, at least 89%, at least 90%, at least 91%, at least 92%, at least 93%, at least 94%, at least 95%, at least 96%, at least 97%, at least 98%, or at least 99% sequence identity to SEQ ID NO: 850. In some embodiments, the polypeptide having protease activity comprises an amino acid sequence having at least 50%, at least 60%, at least 70%, at least 80%, at least 81%, at least 82%, at least 83%, at least 84%, at least 85%, at least 86%, at least 87%, at least 88%, at least 89%, at least 90%, at least 91%, at least 92%, at least 93%, at least 94%, at least 95%, at least 96%, at least 97%, at least 98%, or at least 99% sequence identity to SEQ ID NO: 851. In some embodiments, the polypeptide having protease activity comprises an amino acid sequence having at least 50%, at least 60%, at least 70%, at least 80%, at least 81%, at least 82%, at least 83%, at least 84%, at least 85%, at least 86%, at least 87%, at least 88%, at least 89%, at least 90%, at least 91%, at least 92%, at least 93%, at least 94%, at least 95%, at least 96%, at least 97%, at least 98%, or at least 99% sequence identity to SEQ ID NO: 852. In some embodiments, the polypeptide having protease activity comprises an amino acid sequence having at least 50%, at least 60%, at least 70%, at least 80%, at least 81%, at least 82%, at least 83%, at least 84%, at least 85%, at least 86%, at least 87%, at least 88%, at least 89%, at least 90%, at least 91%, at least 92%, at least 93%, at least 94%, at least 95%, at least 96%, at least 97%, at least 98%, or at least 99% sequence identity to SEQ ID NO: 853. In some embodiments, the polypeptide having protease activity comprises an amino acid sequence having at least 50%, at least 60%, at least 70%, at least 80%, at least 81%, at least 82%, at least 83%, at least 84%, at least 85%, at least 86%, at least 87%, at least 88%, at least 89%, at least 90%, at least 91%, at least 92%, at least 93%, at least 94%, at least 95%, at least 96%, at least 97%, at least 98%, or at least 99% sequence identity to SEQ ID NO: 854. In some embodiments, the polypeptide having protease activity comprises an amino acid sequence having at least 50%, at least 60%, at least 70%, at least 80%, at least 81%, at least 82%, at least 83%, at least 84%, at least 85%, at least 86%, at least 87%, at least 88%, at least 89%, at least 90%, at least 91%, at least 92%, at least 93%, at least 94%, at least 95%, at least 96%, at least 97%, at least 98%, or at least 99% sequence identity to SEQ ID NO: 855. In some embodiments, the polypeptide having protease activity comprises an amino acid sequence having at least 50%, at least 60%, at least 70%, at least 80%, at least 81%, at least 82%, at least 83%, at least 84%, at least 85%, at least 86%, at least 87%, at least 88%, at least 89%, at least 90%, at least 91%, at least 92%, at least 93%, at least 94%, at least 95%, at least 96%, at least 97%, at least 98%, or at least 99% sequence identity to SEQ ID NO: 856. In some embodiments, the polypeptide having protease activity comprises an amino acid sequence having at least 50%, at least 60%, at least 70%, at least 80%, at least 81%, at least 82%, at least 83%, at least 84%, at least 85%, at least 86%, at least 87%, at least 88%, at least 89%, at least 90%, at least 91%, at least 92%, at least 93%, at least 94%, at least 95%, at least 96%, at least 97%, at least 98%, or at least 99% sequence identity to SEQ ID NO: 857. In some embodiments, the polypeptide having protease activity comprises an amino acid sequence having at least 50%, at least 60%, at least 70%, at least 80%, at least 81%, at least 82%, at least 83%, at least 84%, at least 85%, at least 86%, at least 87%, at least 88%, at least 89%, at least 90%, at least 91%, at least 92%, at least 93%, at least 94%, at least 95%, at least 96%, at least 97%, at least 98%, or at least 99% sequence identity to SEQ ID NO: 858. In some embodiments, the polypeptide having protease activity comprises an amino acid sequence having at least 50%, at least 60%, at least 70%, at least 80%, at least 81%, at least 82%, at least 83%, at least 84%, at least 85%, at least 86%, at least 87%, at least 88%, at least 89%, at least 90%, at least 91%, at least 92%, at least 93%, at least 94%, at least 95%, at least 96%, at least 97%, at least 98%, or at least 99% sequence identity to SEQ ID NO: 859. In some embodiments, the polypeptide having protease activity comprises an amino acid sequence having at least 50%, at least 60%, at least 70%, at least 80%, at least 81%, at least 82%, at least 83%, at least 84%, at least 85%, at least 86%, at least 87%, at least 88%, at least 89%, at least 90%, at least 91%, at least 92%, at least 93%, at least 94%, at least 95%, at least 96%, at least 97%, at least 98%, or at least 99% sequence identity to SEQ ID NO: 860. In some embodiments, the polypeptide having protease activity comprises an amino acid sequence having at least 50%, at least 60%, at least 70%, at least 80%, at least 81%, at least 82%, at least 83%, at least 84%, at least 85%, at least 86%, at least 87%, at least 88%, at least 89%, at least 90%, at least 91%, at least 92%, at least 93%, at least 94%, at least 95%, at least 96%, at least 97%, at least 98%, or at least 99% sequence identity to SEQ ID NO: 861. In some embodiments, the polypeptide having protease activity comprises an amino acid sequence having at least 50%, at least 60%, at least 70%, at least 80%, at least 81%, at least 82%, at least 83%, at least 84%, at least 85%, at least 86%, at least 87%, at least 88%, at least 89%, at least 90%, at least 91%, at least 92%, at least 93%, at least 94%, at least 95%, at least 96%, at least 97%, at least 98%, or at least 99% sequence identity to SEQ ID NO: 862. In some embodiments, the polypeptide having protease activity comprises an amino acid sequence having at least 50%, at least 60%, at least 70%, at least 80%, at least 81%, at least 82%, at least 83%, at least 84%, at least 85%, at least 86%, at least 87%, at least 88%, at least 89%, at least 90%, at least 91%, at least 92%, at least 93%, at least 94%, at least 95%, at least 96%, at least 97%, at least 98%, or at least 99% sequence identity to SEQ ID NO: 863. In some embodiments, the polypeptide having protease activity comprises an amino acid sequence having at least 50%, at least 60%, at least 70%, at least 80%, at least 81%, at least 82%, at least 83%, at least 84%, at least 85%, at least 86%, at least 87%, at least 88%, at least 89%, at least 90%, at least 91%, at least 92%, at least 93%, at least 94%, at least 95%, at least 96%, at least 97%, at least 98%, or at least 99% sequence identity to SEQ ID NO: 864. In some embodiments, the polypeptide having protease activity comprises an amino acid sequence having at least 50%, at least 60%, at least 70%, at least 80%, at least 81%, at least 82%, at least 83%, at least 84%, at least 85%, at least 86%, at least 87%, at least 88%, at least 89%, at least 90%, at least 91%, at least 92%, at least 93%, at least 94%, at least 95%, at least 96%, at least 97%, at least 98%, or at least 99% sequence identity to SEQ ID NO: 885. In some embodiments, the polypeptide having protease activity comprises an amino acid sequence having at least 50%, at least 60%, at least 70%, at least 80%, at least 81%, at least 82%, at least 83%, at least 84%, at least 85%, at least 86%, at least 87%, at least 88%, at least 89%, at least 90%, at least 91%, at least 92%, at least 93%, at least 94%, at least 95%, at least 96%, at least 97%, at least 98%, or at least 99% sequence identity to SEQ ID NO: 886. In some embodiments, the polypeptide having protease activity comprises an amino acid sequence having at least 50%, at least 60%, at least 70%, at least 80%, at least 81%, at least 82%, at least 83%, at least 84%, at least 85%, at least 86%, at least 87%, at least 88%, at least 89%, at least 90%, at least 91%, at least 92%, at least 93%, at least 94%, at least 95%, at least 96%, at least 97%, at least 98%, or at least 99% sequence identity to SEQ ID NO: 887. In some embodiments, the polypeptide having protease activity comprises an amino acid sequence having at least 50%, at least 60%, at least 70%, at least 80%, at least 81%, at least 82%, at least 83%, at least 84%, at least 85%, at least 86%, at least 87%, at least 88%, at least 89%, at least 90%, at least 91%, at least 92%, at least 93%, at least 94%, at least 95%, at least 96%, at least 97%, at least 98%, or at least 99% sequence identity to SEQ ID NO: 888. In some embodiments, the polypeptide having protease activity comprises an amino acid sequence having at least 50%, at least 60%, at least 70%, at least 80%, at least 81%, at least 82%, at least 83%, at least 84%, at least 85%, at least 86%, at least 87%, at least 88%, at least 89%, at least 90%, at least 91%, at least 92%, at least 93%, at least 94%, at least 95%, at least 96%, at least 97%, at least 98%, or at least 99% sequence identity to SEQ ID NO: 889. In some embodiments, the polypeptide having protease activity comprises an amino acid sequence having at least 50%, at least 60%, at least 70%, at least 80%, at least 81%, at least 82%, at least 83%, at least 84%, at least 85%, at least 86%, at least 87%, at least 88%, at least 89%, at least 90%, at least 91%, at least 92%, at least 93%, at least 94%, at least 95%, at least 96%, at least 97%, at least 98%, or at least 99% sequence identity to SEQ ID NO: 890. In some embodiments, the polypeptide having protease activity comprises an amino acid sequence having at least 50%, at least 60%, at least 70%, at least 80%, at least 81%, at least 82%, at least 83%, at least 84%, at least 85%, at least 86%, at least 87%, at least 88%, at least 89%, at least 90%, at least 91%, at least 92%, at least 93%, at least 94%, at least 95%, at least 96%, at least 97%, at least 98%, or at least 99% sequence identity to SEQ ID NO: 891. In some embodiments, the polypeptide having protease activity comprises an amino acid sequence having at least 50%, at least 60%, at least 70%, at least 80%, at least 81%, at least 82%, at least 83%, at least 84%, at least 85%, at least 86%, at least 87%, at least 88%, at least 89%, at least 90%, at least 91%, at least 92%, at least 93%, at least 94%, at least 95%, at least 96%, at least 97%, at least 98%, or at least 99% sequence identity to SEQ ID NO: 892. In some embodiments, the polypeptide having protease activity comprises an amino acid sequence having at least 50%, at least 60%, at least 70%, at least 80%, at least 81%, at least 82%, at least 83%, at least 84%, at least 85%, at least 86%, at least 87%, at least 88%, at least 89%, at least 90%, at least 91%, at least 92%, at least 93%, at least 94%, at least 95%, at least 96%, at least 97%, at least 98%, or at least 99% sequence identity to SEQ ID NO: 893. In some embodiments, the polypeptide having protease activity comprises an amino acid sequence having at least 50%, at least 60%, at least 70%, at least 80%, at least 81%, at least 82%, at least 83%, at least 84%, at least 85%, at least 86%, at least 87%, at least 88%, at least 89%, at least 90%, at least 91%, at least 92%, at least 93%, at least 94%, at least 95%, at least 96%, at least 97%, at least 98%, or at least 99% sequence identity to SEQ ID NO: 894. In some embodiments, the polypeptide having protease activity comprises an amino acid sequence having at least 50%, at least 60%, at least 70%, at least 80%, at least 81%, at least 82%, at least 83%, at least 84%, at least 85%, at least 86%, at least 87%, at least 88%, at least 89%, at least 90%, at least 91%, at least 92%, at least 93%, at least 94%, at least 95%, at least 96%, at least 97%, at least 98%, or at least 99% sequence identity to SEQ ID NO: 895. In some embodiments, the polypeptide having protease activity comprises an amino acid sequence having at least 50%, at least 60%, at least 70%, at least 80%, at least 81%, at least 82%, at least 83%, at least 84%, at least 85%, at least 86%, at least 87%, at least 88%, at least 89%, at least 90%, at least 91%, at least 92%, at least 93%, at least 94%, at least 95%, at least 96%, at least 97%, at least 98%, or at least 99% sequence identity to SEQ ID NO: 896. In some embodiments, the polypeptide having protease activity comprises an amino acid sequence having at least 50%, at least 60%, at least 70%, at least 80%, at least 81%, at least 82%, at least 83%, at least 84%, at least 85%, at least 86%, at least 87%, at least 88%, at least 89%, at least 90%, at least 91%, at least 92%, at least 93%, at least 94%, at least 95%, at least 96%, at least 97%, at least 98%, or at least 99% sequence identity to SEQ ID NO: 897. In some embodiments, the polypeptide having protease activity comprises an amino acid sequence having at least 50%, at least 60%, at least 70%, at least 80%, at least 81%, at least 82%, at least 83%, at least 84%, at least 85%, at least 86%, at least 87%, at least 88%, at least 89%, at least 90%, at least 91%, at least 92%, at least 93%, at least 94%, at least 95%, at least 96%, at least 97%, at least 98%, or at least 99% sequence identity to SEQ ID NO: 898. In some embodiments, the polypeptide having protease activity comprises an amino acid sequence having at least 50%, at least 60%, at least 70%, at least 80%, at least 81%, at least 82%, at least 83%, at least 84%, at least 85%, at least 86%, at least 87%, at least 88%, at least 89%, at least 90%, at least 91%, at least 92%, at least 93%, at least 94%, at least 95%, at least 96%, at least 97%, at least 98%, or at least 99% sequence identity to SEQ ID NO: 899. In some embodiments, the polypeptide having protease activity comprises an amino acid sequence having at least 50%, at least 60%, at least 70%, at least 80%, at least 81%, at least 82%, at least 83%, at least 84%, at least 85%, at least 86%, at least 87%, at least 88%, at least 89%, at least 90%, at least 91%, at least 92%, at least 93%, at least 94%, at least 95%, at least 96%, at least 97%, at least 98%, or at least 99% sequence identity to SEQ ID NO: 900. In some embodiments, the polypeptide having protease activity comprises an amino acid sequence having at least 50%, at least 60%, at least 70%, at least 80%, at least 81%, at least 82%, at least 83%, at least 84%, at least 85%, at least 86%, at least 87%, at least 88%, at least 89%, at least 90%, at least 91%, at least 92%, at least 93%, at least 94%, at least 95%, at least 96%, at least 97%, at least 98%, or at least 99% sequence identity to SEQ ID NO: 901. In some embodiments, the polypeptide having protease activity comprises an amino acid sequence having at least 50%, at least 60%, at least 70%, at least 80%, at least 81%, at least 82%, at least 83%, at least 84%, at least 85%, at least 86%, at least 87%, at least 88%, at least 89%, at least 90%, at least 91%, at least 92%, at least 93%, at least 94%, at least 95%, at least 96%, at least 97%, at least 98%, or at least 99% sequence identity to SEQ ID NO: 902. In some embodiments, the polypeptide having protease activity comprises an amino acid sequence having at least 50%, at least 60%, at least 70%, at least 80%, at least 81%, at least 82%, at least 83%, at least 84%, at least 85%, at least 86%, at least 87%, at least 88%, at least 89%, at least 90%, at least 91%, at least 92%, at least 93%, at least 94%, at least 95%, at least 96%, at least 97%, at least 98%, or at least 99% sequence identity to SEQ ID NO: 903. In some embodiments, the polypeptide having protease activity comprises an amino acid sequence having at least 50%, at least 60%, at least 70%, at least 80%, at least 81%, at least 82%, at least 83%, at least 84%, at least 85%, at least 86%, at least 87%, at least 88%, at least 89%, at least 90%, at least 91%, at least 92%, at least 93%, at least 94%, at least 95%, at least 96%, at least 97%, at least 98%, or at least 99% sequence identity to SEQ ID NO: 904. In some embodiments, the polypeptide having protease activity comprises an amino acid sequence having at least 50%, at least 60%, at least 70%, at least 80%, at least 81%, at least 82%, at least 83%, at least 84%, at least 85%, at least 86%, at least 87%, at least 88%, at least 89%, at least 90%, at least 91%, at least 92%, at least 93%, at least 94%, at least 95%, at least 96%, at least 97%, at least 98%, or at least 99% sequence identity to SEQ ID NO: 905. In some embodiments, the polypeptide having protease activity comprises an amino acid sequence having at least 50%, at least 60%, at least 70%, at least 80%, at least 81%, at least 82%, at least 83%, at least 84%, at least 85%, at least 86%, at least 87%, at least 88%, at least 89%, at least 90%, at least 91%, at least 92%, at least 93%, at least 94%, at least 95%, at least 96%, at least 97%, at least 98%, or at least 99% sequence identity to SEQ ID NO: 906. In some embodiments, the polypeptide having protease activity comprises an amino acid sequence having at least 50%, at least 60%, at least 70%, at least 80%, at least 81%, at least 82%, at least 83%, at least 84%, at least 85%, at least 86%, at least 87%, at least 88%, at least 89%, at least 90%, at least 91%, at least 92%, at least 93%, at least 94%, at least 95%, at least 96%, at least 97%, at least 98%, or at least 99% sequence identity to SEQ ID NO: 907. In some embodiments, the polypeptide having protease activity comprises an amino acid sequence having at least 50%, at least 60%, at least 70%, at least 80%, at least 81%, at least 82%, at least 83%, at least 84%, at least 85%, at least 86%, at least 87%, at least 88%, at least 89%, at least 90%, at least 91%, at least 92%, at least 93%, at least 94%, at least 95%, at least 96%, at least 97%, at least 98%, or at least 99% sequence identity to SEQ ID NO: 908. In some embodiments, the polypeptide having protease activity comprises an amino acid sequence having at least 50%, at least 60%, at least 70%, at least 80%, at least 81%, at least 82%, at least 83%, at least 84%, at least 85%, at least 86%, at least 87%, at least 88%, at least 89%, at least 90%, at least 91%, at least 92%, at least 93%, at least 94%, at least 95%, at least 96%, at least 97%, at least 98%, or at least 99% sequence identity to SEQ ID NO: 909. In some embodiments, the polypeptide having protease activity comprises an amino acid sequence having at least 50%, at least 60%, at least 70%, at least 80%, at least 81%, at least 82%, at least 83%, at least 84%, at least 85%, at least 86%, at least 87%, at least 88%, at least 89%, at least 90%, at least 91%, at least 92%, at least 93%, at least 94%, at least 95%, at least 96%, at least 97%, at least 98%, or at least 99% sequence identity to SEQ ID NO: 910. In some embodiments, the polypeptide having protease activity comprises an amino acid sequence having at least 50%, at least 60%, at least 70%, at least 80%, at least 81%, at least 82%, at least 83%, at least 84%, at least 85%, at least 86%, at least 87%, at least 88%, at least 89%, at least 90%, at least 91%, at least 92%, at least 93%, at least 94%, at least 95%, at least 96%, at least 97%, at least 98%, or at least 99% sequence identity to SEQ ID NO: 911. In some embodiments, the polypeptide having protease activity comprises an amino acid sequence having at least 50%, at least 60%, at least 70%, at least 80%, at least 81%, at least 82%, at least 83%, at least 84%, at least 85%, at least 86%, at least 87%, at least 88%, at least 89%, at least 90%, at least 91%, at least 92%, at least 93%, at least 94%, at least 95%, at least 96%, at least 97%, at least 98%, or at least 99% sequence identity to SEQ ID NO: 912. In some embodiments, the polypeptide having protease activity comprises an amino acid sequence having at least 50%, at least 60%, at least 70%, at least 80%, at least 81%, at least 82%, at least 83%, at least 84%, at least 85%, at least 86%, at least 87%, at least 88%, at least 89%, at least 90%, at least 91%, at least 92%, at least 93%, at least 94%, at least 95%, at least 96%, at least 97%, at least 98%, or at least 99% sequence identity to SEQ ID NO: 913. In some embodiments, the polypeptide having protease activity comprises an amino acid sequence having at least 50%, at least 60%, at least 70%, at least 80%, at least 81%, at least 82%, at least 83%, at least 84%, at least 85%, at least 86%, at least 87%, at least 88%, at least 89%, at least 90%, at least 91%, at least 92%, at least 93%, at least 94%, at least 95%, at least 96%, at least 97%, at least 98%, or at least 99% sequence identity to SEQ ID NO: 914. In some embodiments, the polypeptide having protease activity comprises an amino acid sequence having at least 50%, at least 60%, at least 70%, at least 80%, at least 81%, at least 82%, at least 83%, at least 84%, at least 85%, at least 86%, at least 87%, at least 88%, at least 89%, at least 90%, at least 91%, at least 92%, at least 93%, at least 94%, at least 95%, at least 96%, at least 97%, at least 98%, or at least 99% sequence identity to SEQ ID NO: 915. In some embodiments, the polypeptide having protease activity comprises an amino acid sequence having at least 50%, at least 60%, at least 70%, at least 80%, at least 81%, at least 82%, at least 83%, at least 84%, at least 85%, at least 86%, at least 87%, at least 88%, at least 89%, at least 90%, at least 91%, at least 92%, at least 93%, at least 94%, at least 95%, at least 96%, at least 97%, at least 98%, or at least 99% sequence identity to SEQ ID NO: 916.

[0074] In some embodiments, the polypeptide having protease activity comprises an amino acid sequence having at least 50%, at least 60%, at least 70%, at least 80%, at least 81%, at least 82%, at least 83%, at least 84%, at least 85%, at least 86%, at least 87%, at least 88%, at least 89%, at least 90%, at least 91%, at least 92%, at least 93%, at least 94%, at least 95%, at least 96%, at least 97%, at least 98%, or at least 99% sequence identity to any one of SEQ ID NO: 380, 251, 5-243, 247, 280-379, 381-528, 737, 745-823, 828-864, or 885-916, provided that the amino acid sequence comprises any one mutation selected from Table 3A or Table 3B.

TABLE 3A

| ID | Polypeptide Seq | Mutation (s) or deletions (as compared to SEQ ID NO: 1) |
|---|---|---|
| PRT-4 | SEQ ID NO: 3 | 1_61del and 380_529del |
| PRT-2 | SEQ ID NO: 4 | 1_52del and 380_529_del |
| PRT-3 | SEQ ID NO: 5 | 1_61del and 380_529del; L153P, R189K, S128A |
| PRT-4 | SEQ ID NO: 6 | 1_61del and 380_529del; L153P, S128A, F333N |
| PRT-5 | SEQ ID NO: 7 | 1_61del and 380_529del; T122S, K229E |
| PRT-6 | SEQ ID NO: 8 | 1_61del and 380_529del; T122S, L153P |
| PRT-7 | SEQ ID NO: 9 | 1_61del and 380_529del; T122S, L153P, R189K |
| PRT-8 | SEQ ID NO: 10 | 1_61del and 380_529del; T122S, L153P, S128A |
| PRT-9 | SEQ ID NO: 11 | 1_61del and 380_529del; T122S, L153P, VI26S |
| PRT-10 | SEQ ID NO: 12 | 1_61del and 380_529del; T122S, S128A, F333N |
| PRT-11 | SEQ ID NO: 13 | 1_61del and 380_529del; E166Q |
| PRT-12 | SEQ ID NO: 14 | 1_61del and 380_529del; K196S |
| PRT-13 | SEQ ID NO: 15 | 1_61del and 380_529del; K196E |
| PRT-14 | SEQ ID NO: 16 | 1_61del and 380_529del; H222Q |
| PRT-15 | SEQ ID NO: 17 | 1_61del and 380_529del; E120G |
| PRT-16 | SEQ ID NO: 18 | 1_61del and 380_529del; K93S |
| PRT-17 | SEQ ID NO: 19 | 1_61del and 380_529del; T122S |
| PRT-18 | SEQ ID NO: 20 | 1_61del and 380_529del; K229E |
| PRT-19 | SEQ ID NO: 21 | 1_61del and 380_529del; N162E |
| PRT-20 | SEQ ID NO: 22 | 1_61del and 380_529del; R280E |
| PRT-21 | SEQ ID NO: 23 | 1_61del and 380_529del; K318G |
| PRT-22 | SEQ ID NO: 24 | 1_61del and 380_529del; K318A |
| PRT-23 | SEQ ID NO: 25 | 1_52del and 380_529 del; T122S, S128A, L153P |
| PRT-24 | SEQ ID NO: 26 | 1_61del and 380_529del; T122S, S128A, L153P, F333N |
| PRT-25 | SEQ ID NO: 27 | 1_61del and 380_529del; D71E, A79V, T122S, S128A, L153P, |
| | | F333N |
| PRT-26 | SEQ ID NO: 28 | 1_61del and 380_529del; A79V, T122S, S128A, L153P, |
| | | R189K, F333N |
| PRT-27 | SEQ ID NO: 29 | 1_61del and 380_529del; A79V, T122S, S128A, L153P, |
| | | H222Q, F333N |
| PRT-28 | SEQ ID NO: 30 | 1_61del and 380_529del; T122S, S128A, L153P, R189K, |
| | | H222Q, F333N |
| PRT-29 | SEQ ID NO: 31 | 1_61del and 380_529del; A79V, T122S, S128A, L153P, |
| | | A167T, F333N |
| PRT-30 | SEQ ID NO: 32 | 1_61del and 380_529del; A79V, T122S, S128A, L153P, |
| | | R189K, H222Q |
| PRT-31 | SEQ ID NO: 33 | 1_61del and 380_529del; A79V, T122S, S128A, L153P, |
| | | A167T, H222Q |
| PRT-32 | SEQ ID NO: 34 | 1_61del and 380_529del; A79V, V102A, T122S, S128A, |
| | | L153P, A167T |
| PRT-33 | SEQ ID NO: 35 | 1_61del and 380_529del; D71E, A79V, T122S, S128A, |
| | | L153P, A167T |
| PRT-34 | SEQ ID NO: 36 | 1_61del and 380_529del; T122S, S128A, L153P, N162E, |
| | | F333N |
| PRT-35 | SEQ ID NO: 37 | 1_61del and 380_529del; T122S, S128A, L153P, K318A, |
| | | F333N |
| PRT-36 | SEQ ID NO: 38 | 1_61del and 380_529del; T122S, S128A, L153P, H222Q, |
| | | K229E, R280E, F333N |
| PRT-37 | SEQ ID NO: 39 | 1_61del and 380_529del; S128A, L153P, H222Q, K229E, |
| | | F333N |
| PRT-38 | SEQ ID NO: 40 | 1_61del and 380_529del; S128A, L153P, H222Q, R280E, |
| | | F333N |
| PRT-39 | SEQ ID NO: 41 | 1_61del and 380_529del; S128A, L153P, K229E, R280E, |
| | | F333N |
| PRT-40 | SEQ ID NO: 42 | 1_61del and 380_529del; T122S, S128A, L153P, N162E, |
| | | H222Q, K229E, R280E, F333N |
| PRT-41 | SEQ ID NO: 43 | 1_61del and 380_529del; S128A, L153P, N162E, K196S, |
| | | F333N |
| PRT-42 | SEQ ID NO: 44 | 1_61del and 380_529del; S128A, L153P, N162E, H222Q, |
| | | F333N |
| PRT-43 | SEQ ID NO: 45 | 1_61del and 380_529del; S128A, L153P, N162E, K229E, |
| | | F333N |
| PRT-44 | SEQ ID NO: 46 | 1_61del and 380_529del; S128A, L153P, N162E, R280E, |
| | | F333N |
| PRT-45 | SEQ ID NO: 47 | 1_61del and 380_529del; S128A, L153P, N162E, K318A, |
| | | F333N |
| PRT-46 | SEQ ID NO: 48 | 1_61del and 380_529del; S128A, L153P, N162E, K196S, |
| | | K318A, F333N |
| PRT-47 | SEQ ID NO: 49 | 1_61del and 380_529del; S128A, L153P, K196S, K318A, |
| | | F333N |
| PRT-48 | SEQ ID NO: 50 | 1_61del and 380_529del; S128A, L153P, N162E, F333N |
| PRT-49 | SEQ ID NO: 51 | 1_61del and 380_529del; S128A, L153P, K196S, F333N |
| PRT-50 | SEQ ID NO: 52 | 1_61del and 380_529del; S128A, L153P, K318A, F333N |
| PRT-51 | SEQ ID NO: 53 | 1_61del and 380_529del; S128A, L153P, K196S, E310Q, |
| | | K318A, F333N |
| PRT-52 | SEQ ID NO: 54 | 1_61del and 380_529del; S128A, L153P, N162E, K196S, |
| | | E310Q, K318A, F333N |
| PRT-53 | SEQ ID NO: 55 | 1_61del and 380_529del; T122S, S128A, L153P, N162E |
| PRT-54 | SEQ ID NO: 56 | 1_61del and 380_529del; T122S, S128A, L153P, K318A |
| PRT-55 | SEQ ID NO: 57 | 1_61del and 380_529del; T122S, S128A, L153P, H222Q, |
| | | K229E, R280E |
| PRT-56 | SEQ ID NO: 58 | 1_61del and 380_529del; T122S, S128A, L153P, H222Q, |
| | | K229E |
| PRT-57 | SEQ ID NO: 59 | 1_61del and 380_529del; T122S, S128A, L153P, H222Q, |
| | | R280E |
| PRT-58 | SEQ ID NO: 60 | 1_61del and 380_529del; T122S, S128A, L153P, K229E, |
| | | R280E |
| PRT-59 | SEQ ID NO: 61 | 1_61del and 380_529del; T122S, S128A, L153P, N162E, |
| | | H222Q, K229E, R280E |
| PRT-60 | SEQ ID NO: 62 | 1_61del and 380_529del; T122S, S128A, L153P, N162E, |
| | | K196S |
| PRT-61 | SEQ ID NO: 63 | 1_61del and 380_529del; T122S, S128A, L153P, N162E, |
| | | H222Q |
| PRT-62 | SEQ ID NO: 64 | 1_61del and 380_529del; T122S, S128A, L153P, N162E, |
| | | K229E |
| PRT-63 | SEQ ID NO: 65 | 1_61del and 380_529del; T122S, S128A, L153P, N162E, |
| | | R280E |
| PRT-64 | SEQ ID NO: 66 | 1_61del and 380_529del; T122S, S128A, L153P, N162E, |
| | | K318A |
| PRT-65 | SEQ ID NO: 67 | 1_61del and 380_529del; T122S, S128A, L153P, N162E, |
| | | K196S, K318A |
| PRT-66 | SEQ ID NO: 68 | 1_61del and 380_529del; T122S, S128A, L153P, K196S, |
| | | K318A |
| PRT-67 | SEQ ID NO: 69 | 1_61del and 380_529del; T122S, S128A, L153P, K196S |
| PRT-68 | SEQ ID NO: 70 | 1_61del and 380_529del; T122S, S128A, L153P, K196S, |
| | | Y212F, K318A |
| PRT-69 | SEQ ID NO: 71 | 1_61del and 380_529del; T122S, S128A, L153P, K196S, |
| | | E310Q, K318A |
| PRT-70 | SEQ ID NO: 72 | 1_61del and 380_529del; T122S, S128A, L153P, N162E, |
| | | K196S, E310Q, K318A |
| PRT-71 | SEQ ID NO: 73 | 1_61del and 380_529del; S128A, L153P, E166D, F333N |
| PRT-72 | SEQ ID NO: 74 | 1_61del and 380_529del; S128A, L153P, K196T, F333N |
| PRT-73 | SEQ ID NO: 75 | 1_61del and 380_529del; S128A, L153P, K196D, F333N |
| PRT-74 | SEQ ID NO: 76 | 1_61del and 380_529del; S128A, L153P, K196N, F333N |
| PRT-75 | SEQ ID NO: 77 | 1_61del and 380_529del; S128A, L153P, H222S, F333N |
| PRT-76 | SEQ ID NO: 78 | 1_61del and 380_529del; S128A, L153P, H222E, F333N |
| PRT-77 | SEQ ID NO: 79 | 1_61del and 380_529del; S128A, L153P, H222T, F333N |
| PRT-78 | SEQ ID NO: 80 | 1_61del and 380_529del; E120D, S128A, L153P, F333N |
| PRT-79 | SEQ ID NO: 81 | 1_61del and 380_529del; T122E, S128A, L153P, F333N |
| PRT-80 | SEQ ID NO: 82 | 1_61del and 380_529del; T122N, S128A, L153P, F333N |
| PRT-81 | SEQ ID NO: 83 | 1_61del and 380_529del; S128A, L153P, K229D, F333N |
| PRT-82 | SEQ ID NO: 84 | 1_61del and 380_529del; S128A, L153P, K229N, F333N |
| PRT-83 | SEQ ID NO: 85 | 1_61del and 380_529del; S128A, L153P, N162D, F333N |
| PRT-84 | SEQ ID NO: 86 | 1_61DEL AND 380_529del; S128A, L153P, R280D, F333N |
| PRT-85 | SEQ ID NO: 87 | 1_61DEL AND 380_529del; S128A, L153P, R280A, F333N |
| PRT-86 | SEQ ID NO: 88 | 1_61DEL AND 380_529del; S128A, L153P, R280Y, F333N |
| PRT-87 | SEQ ID NO: 89 | 1_61DEL AND 380_529del; S128A, L153P, R280N, F333N |
| PRT-88 | SEQ ID NO: 90 | 1_61DEL AND 380_529del; S128A, L153P, R280T, F333N |
| PRT-89 | SEQ ID NO: 91 | 1_61DEL AND 380_529del; S128A, L153P, K324I, F333N |
| PRT-90 | SEQ ID NO: 92 | 1_61DEL AND 380_529del; S128A, L153P, E310D, F333N |
| PRT-91 | SEQ ID NO: 93 | 1_61DEL AND 380_529del; S128A, L153P, E310N, F333N |
| PRT-94 | SEQ ID NO: 96 | 1_61DEL AND 380_529del; S128A, L153P, E310S, F333N |
| PRT-95 | SEQ ID NO: 97 | 1_61DEL AND 380_529del; S128A, L153P, K318N, F333N |
| PRT-96 | SEQ ID NO: 98 | 1_61DEL AND 380_529del; S128A, L153P, K318E, F333N |
| PRT-97 | SEQ ID NO: 99 | 1_61DEL AND 380_529del; S128A, L153P, K318D, F333N |
| PRT-98 | SEQ ID NO: 100 | 1_61DEL AND 380_529del; S128A, L153P, K318Q, F333N |
| PRT-99 | SEQ ID NO: 101 | 1_61DEL AND 380_529del; S128A, L153P, K318P, F333N |
| PRT-100 | SEQ ID NO: 102 | 1_61DEL AND 380_529del; S128A, L153P, K318F, F333N |
| PRT-101 | SEQ ID NO: 103 | 1_61DEL AND 380_529del; S128A, L153P, K318V, F333N |
| PRT-102 | SEQ ID NO: 104 | 1_61DEL AND 380_529del; S128A, L153P, K318L, F333N |
| PRT-103 | SEQ ID NO: 105 | 1_61DEL AND 380_529del; S128A, L153P, K318S, F333N |
| PRT-104 | SEQ ID NO: 106 | 1_61DEL AND 380_529del; S128A, L153P, K318I, F333N |
| PRT-105 | SEQ ID NO: 107 | 1_61DEL AND 380_529del; S128A, L153P, K201E, F333N |
| PRT-106 | SEQ ID NO: 108 | 1_61DEL AND 380_529del; S128A, L153P, K201S, F333N |
| PRT-107 | SEQ ID NO: 109 | 1_61DEL AND 380_529del; S128A, L153P, H197S, F333N |
| PRT-108 | SEQ ID NO: 110 | 1_61DEL AND 380_529del; S128A, L153P, K160E, F333N |
| PRT-109 | SEQ ID NO: 111 | 1_61DEL AND 380_529del; S128A, L153P, K165E, F333N |
| PRT-110 | SEQ ID NO: 112 | 1_61DEL AND 380_529del; S128A, L153P, R309G, F333N |
| PRT-111 | SEQ ID NO: 113 | 1_61DEL AND 380_529del; S128A, L153P, R319E, F333N |
| PRT-112 | SEQ ID NO: 114 | 1_61DEL AND 380_529del; S128A, L153P, R319T, F333N |
| PRT-113 | SEQ ID NO: 115 | 1_61DEL AND 380_529del; S128A, L153P, R320Q, F333N |
| PRT-114 | SEQ ID NO: 116 | 1_61DEL AND 380_529del; S128A, L153P, R320L, F333N |
| PRT-115 | SEQ ID NO: 117 | 1_61del and 380_529del; A79V, S128A, L153P, R189K, |
| | | H222Q, F333N |
| PRT-116 | SEQ ID NO: 118 | 1_61del and 380_529del; D71E, A79V, S128A, L153P, |
| | | H222Q, F333N |
| PRT-117 | SEQ ID NO: 119 | 1_61del and 380_529del; D71E, A79V, S128A, L153P, |
| | | R189K, F333N |
| PRT-118 | SEQ ID NO: 120 | 1_61del and 380_529del; D71E, S128A, L153P, R189K, |
| | | H222Q, F333N |
| PRT-119 | SEQ ID NO: 121 | 1_61DEL AND 380_529del; S128A, L153P, K324I, F333N, |
| | | N162E, K229E |
| PRT-120 | SEQ ID NO: 122 | 1_61DEL AND 380_529del; S128A, L153P, K324I, F333N, |
| | | N162E, K229E, K196D |
| PRT-121 | SEQ ID NO: 123 | 1_61DEL AND 380_529del; S128A, L153P, K324I, F333N, |
| | | N162E, K229E, R280T |
| PRT-122 | SEQ ID NO: 124 | 1_61DEL AND 380_529del; S128A, L153P, K324I, F333N, |
| | | N162E, K229E, R280T, K196D |
| PRT-123 | SEQ ID NO: 125 | 1_61DEL AND 380_529del; S128A, L153P, K324I, F333N, |
| | | K196D |
| PRT-124 | SEQ ID NO: 126 | 1_61DEL AND 380_529del; S128A, L153P, K324I, F333N, |
| | | R280T |
| PRT-125 | SEQ ID NO: 127 | 1_61DEL AND 380_529del; S128A, L153P, K324I, F333N, |
| | | R280T, K196D |
| PRT-126 | SEQ ID NO: 128 | 1_61DEL AND 380_529del; S128A, L153P, K324I, F333N, |
| | | N162E, K229E, K196S |
| PRT-127 | SEQ ID NO: 129 | 1_61DEL AND 380_529del; S128A, L153P, K324I, F333N, |
| | | N162E, K229E, R280T, K196S |
| PRT-128 | SEQ ID NO: 130 | 1_61DEL AND 380_529del; S128A, L153P, K324I, F333N, |
| | | N162E, K229E, R280T, H222Q |
| PRT-129 | SEQ ID NO: 131 | 1_61DEL AND 380_529del; S128A, L153P, K324I, F333N, |
| | | N162E, K229E, R280T, H222Q, K196D |
| PRT-130 | SEQ ID NO: 132 | 1_61DEL AND 380_529del; S128A, L153P, K324I, F333N, |
| | | N162E, K229E, R280T, H222Q, K196S |
| PRT-131 | SEQ ID NO: 133 | 1_61DEL AND 380_529del; S128A, L153P, K324I, F333N, |
| | | K318S |
| PRT-132 | SEQ ID NO: 134 | 1_61DEL AND 380_529del; S128A, L153P, K324I, F333N, |
| | | N162E, K229E, K318S |
| PRT-133 | SEQ ID NO: 135 | 1_61DEL AND 380_529del; S128A, L153P, K324I, F333N, |
| | | N162E, K229E, R280T, K318S |
| PRT-134 | SEQ ID NO: 136 | 1_61DEL AND 380_529del; S128A, L153P, K324I, F333N, |
| | | R320W |
| PRT-135 | SEQ ID NO: 137 | 1_61DEL AND 380_529del; S128A, L153P, K324I, F333N, |
| | | N162E, K229E, R320W |
| PRT-136 | SEQ ID NO: 138 | 1_61DEL AND 380_529del; S128A, L153P, K324I, F333N, |
| | | N162E, K229E, R280T, R320W |
| PRT-137 | SEQ ID NO: 139 | 1_61DEL AND 380_529del; S128A, L153P, K324I, F333N, |
| | | T122S |
| PRT-138 | SEQ ID NO: 140 | 1_61DEL AND 380_529del; S128A, L153P, K324I, F333N, |
| | | N162E, K229E, T122S |
| PRT-139 | SEQ ID NO: 141 | 1_61DEL AND 380_529del; S128A, L153P, K324I, F333N, |
| | | N162E, K229E, R280T, T122S |
| PRT-140 | SEQ ID NO: 142 | 1_61DEL AND 380_529del; S128A, L153P, K324I, F333N, |
| | | D71Q, K68W, E75Y, D88H |
| PRT-141 | SEQ ID NO: 143 | 1_61DEL AND 380_529del; S128A, L153P, K324I, F333N, |
| | | N162E, K229E, D71Q, K68W, E75Y, D88H |
| PRT-142 | SEQ ID NO: 144 | 1_61DEL AND 380_529del; S128A, L153P, K324I, F333N, |
| | | N162E, K229E, R280T, D71Q, K68W, E75Y, D88H |
| PRT-143 | SEQ ID NO: 145 | 1_61DEL AND 380_529del; S128A, L153P, K324I, F333N, |
| | | N162E, K229E, R280T, K196D, D71Q, K68W, E75Y, D88H |
| PRT-144 | SEQ ID NO: 146 | 1_61DEL AND 380_529del; S128A, L153P, K324I, F333N, |
| | | K318S, R320W, T122S, D71Q, K68W, E75Y, D88H |
| PRT-145 | SEQ ID NO: 147 | 1_61DEL AND 380_529del; S128A, L153P, K324I, F333N, |
| | | N162E, K229E, K318S, R320W, T122S, D71Q, K68W, E75Y, |
| | | D88H |
| PRT-146 | SEQ ID NO: 148 | 1_61DEL AND 380_529del; S128A, L153P, K324I, F333N, |
| | | N162E, K229E, R280T, K318S, R320W, T122S, D71Q, K68W, |
| | | E75Y, D88H |
| PRT-147 | SEQ ID NO: 149 | 1_61DEL AND 380_529del; S128A, L153P, K324I, F333N, |
| | | N162E, K229E, R280T, K196D, K318S, R320W, T122S, D71Q, |
| | | K68W, E75Y, D88H |
| PRT-148 | SEQ ID NO: 150 | 1_61DEL AND 380_529del; S128A, L153P, K324I, F333N, |
| | | H275Y |
| PRT-149 | SEQ ID NO: 151 | 1_61DEL AND 380_529del; S128A, L153P, K324I, F333N, |
| | | N162E, K229E, H275Y |
| PRT-150 | SEQ ID NO: 152 | 1_61DEL AND 380_529del; S128A, L153P, K324I, F333N, |
| | | N162E, K229E, R280T, H275Y |
| PRT-151 | SEQ ID NO: 153 | 1_61DEL AND 380_529del; S128A, L153P, K324I, F333N, |
| | | N162E, K229E, R280T, H222Q, K196S, K318S |
| PRT-152 | SEQ ID NO: 154 | 1_61DEL AND 380_529del; S128A, L153P, K324I, F333N, |
| | | N162E, K229E, R280T, H222Q, K196S, R320W |
| PRT-153 | SEQ ID NO: 155 | 1_61DEL AND 380_529del; S128A, L153P, K324I, F333N, |
| | | N162E, K229E, R280T, H222Q, K196S, T122S |
| PRT-154 | SEQ ID NO: 156 | 1_61DEL AND 380_529del; S128A, L153P, K324I, F333N, |
| | | N162E, K229E, R280T, H222Q, K196S, H275Y |
| PRT-155 | SEQ ID NO: 157 | 1_61DEL AND 380_529del; S128A, L153P, K324I, F333N, |
| | | N162E, K229E, R280T, H222Q, K196S, D71Q, K68W, E75Y, |
| | | D88H |
| PRT-156 | SEQ ID NO: 158 | 1_61DEL AND 380_529del; S128A, L153P, K324I, F333N, |
| | | N162E, K229E, R280T, H222Q, K196S, K318S, R320W, T122S, |
| | | D71Q, K68W, E75Y, D88H |
| PRT-157 | SEQ ID NO: 159 | 1_61DEL AND 380_529del; S128A, L153P, K324I, F333N, |
| | | D71Q |
| PRT-158 | SEQ ID NO: 160 | 1_61DEL AND 380_529del; S128A, L153P, K324I, F333N, |
| | | D112Q |
| PRT-159 | SEQ ID NO: 161 | 1_61DEL AND 380_529del; S128A, L153P, K324I, F333N, |
| | | D327Y |
| PRT-160 | SEQ ID NO: 162 | 1_61DEL AND 380_529del; S128A, L153P, K324I, F333N, |
| | | K68W |
| PRT-161 | SEQ ID NO: 163 | 1_61DEL AND 380_529del; S128A, L153P, K324I, F333N, |
| | | E75Y |
| PRT-162 | SEQ ID NO: 164 | 1_61DEL AND 380_529del; S128A, L153P, K324I, F333N, |
| | | D88H |
| PRT-163 | SEQ ID NO: 165 | 1_61DEL AND 380_529del; S128A, L153P, K324I, F333N, |
| | | N219Q |
| PRT-164 | SEQ ID NO: 166 | 1_61DEL AND 380_529del; S128A, L153P, K324I, F333N, |
| | | S221N |
| PRT-165 | SEQ ID NO: 167 | 1_61DEL AND 380_529del; S128A, L153P, K324I, F333N, |
| | | N219G |
| PRT-166 | SEQ ID NO: 168 | 1_61DEL AND 380_529del; S128A, L153P, K324I, F333N, |
| | | N219T |
| PRT-167 | SEQ ID NO: 169 | 1_61DEL AND 380_529del; S128A, L153P, K324I, F333N, |
| | | K318S, N316S |
| PRT-168 | SEQ ID NO: 170 | 1_61DEL AND 380_529del; S128A, L153P, K324I, F333N, |
| | | K318S, N316Q |
| PRT-183 | SEQ ID NO: 185 | 1_61DEL AND 380_529del; S128A, L153P, K324I, F333N, |
| | | S221E |
| PRT-184 | SEQ ID NO: 186 | 1_61DEL AND 380_529del; S128A, L153P, K324I, F333N, |
| | | N219K |
| PRT-185 | SEQ ID NO: 187 | 1_61DEL AND 380_529del; S128A, L153P, K324I, F333N, |
| | | Y252R |
| PRT-186 | SEQ ID NO: 188 | 1_61DEL AND 380_529del; S128A, L153P, K324I, F333N, |
| | | R250GYG, S251I |
| PRT-187 | SEQ ID NO: 189 | 1_61DEL AND 380_529del; S128A, L153P, K324I, F333N, |
| | | R250GGYGG (SEQ ID NO: 918), S251I |
| PRT-188 | SEQ ID NO: 190 | 1_61DEL AND 380_529del; S128A, L153P, K324I, F333N, |
| | | P205L, E206T |
| PRT-189 | SEQ ID NO: 191 | 1_61DEL AND 380_529del; S128A, L153P, K324I, F333N, |
| | | P205F, E206T |
| PRT-190 | SEQ ID NO: 192 | 1_61DEL AND 380_529del; S128A, L153P, K324I, F333N, |
| | | P205LG, E206T |
| PRT-191 | SEQ ID NO: 193 | 1_61DEL AND 380_529del; S128A, L153P, K324I, F333N, |
| | | P205FG, E206T |
| PRT-192 | SEQ ID NO: 194 | 1_61DEL AND 380_529del; S128A, L153P, K324I, F333N, |
| | | P205FG, E206T, R250GYG, S251I |
| PRT-193 | SEQ ID NO: 195 | 1_61DEL AND 380_529del; S128A, L153P, K324I, F333N, |
| | | K149L, I262K, T276G, V364E, P205FG, E206T, R250GYG, |
| | | S251I |
| PRT-194 | SEQ ID NO: 196 | 1_61DEL AND 380_529del; S128A, L153P, K324I, F333N, |
| | | K149L, G199P, I262K, T276G, V364E |
| PRT-195 | SEQ ID NO: 197 | 1_61DEL AND 380_529del; S128A, L153P, K324I, F333N, |
| | | K116D, K149L, N182D, K196D, I262K, T276G, V364E |
| PRT-196 | SEQ ID NO: 198 | 1_61DEL AND 380_529del; S128A, L153P, K324I, F333N, |
| | | S94E, K116D, K149L, N182D, K196D, I262K, T276G, I336A, |
| | | V364E |
| PRT-197 | SEQ ID NO: 199 | 1_61DEL AND 380_529del; S128A, L153P, K324I, F333N, |
| | | S94E, K116D, K149L, N182D, K196D, Y224T, I262K, T276G, |
| | | I336A, V364E |
| PRT-198 | SEQ ID NO: 200 | 1_61DEL AND 380_529del; S128A, L153P, K324I, F333N, |
| | | S94E, K116D, K149L, N182D, K196D, Y224T, I262K, T276G, |
| | | Y281T, I336A, V364E |
| PRT-199 | SEQ ID NO: 201 | 1_61DEL AND 380_529del; S128A, L153P, K324I, F333N, |
| | | S94E, K116D, K149L, N182D, K196D, Y224T, I262K, T276G, |
| | | Y281T, I336A, V364E, H174E |
| PRT-200 | SEQ ID NO: 202 | 1_61DEL AND 380_529del; S128A, L153P, K324I, F333N, |
| | | S94E, K116D, K149L, N182D, K196D, Y224T, V270P, T276G, |
| | | Y281T, I336A, V364E |
| PRT-201 | SEQ ID NO: 203 | 1_61DEL AND 380_529del; S128A, L153P, K324I, F333N, |
| | | S94E, K116D, K149L, N182D, K196D, Y224T, V270P, V274G, |
| | | Y281T, I336A, V364E |
| PRT-202 | SEQ ID NO: 204 | 1_61DEL AND 380_529del; S128A, L153P, K324I, F333N, |
| | | S94E, K116D, K149L, N182D, G199P, Y224T, V270P, V274G, |
| | | Y281T, I336A, V364E |
| PRT-203 | SEQ ID NO: 205 | 1_61DEL AND 380_529del; S128A, L153P, K324I, F333N, |
| | | K149L, K196D, I262K, T276G, V364E |
| PRT-204 | SEQ ID NO: 206 | 1_61DEL AND 380_529del; S128A, L153P, K324I, F333N, |
| | | I262K, V274G, Y281T |
| PRT-205 | SEQ ID NO: 207 | 1_61DEL AND 380_529del; S128A, L153P, K324I, F333N, |
| | | G199P, I262K, T276G, Y281T |
| PRT-206 | SEQ ID NO: 208 | 1_61DEL AND 380_529del; S128A, L153P, K324I, F333N, |
| | | K196D, I262K, T276G, Y281T |
| PRT-207 | SEQ ID NO: 209 | 1_61DEL AND 380_529del; S128A, L153P, K324I, F333N, |
| | | G199P, Y224T, I262K, T276G, Y281T |
| PRT-208 | SEQ ID NO: 210 | 1_61DEL AND 380_529del; S128A, L153P, K324I, F333N, |
| | | G199P, Y224T, I262K, T276G, Y281T, I336A |
| PRT-209 | SEQ ID NO: 211 | 1_61DEL AND 380_529del; S128A, L153P, K324I, F333N, |
| | | K149L, G199P, Y224T, I262K, T276G, Y281T, I336A, V364E |
| PRT-210 | SEQ ID NO: 212 | 1_61DEL AND 380_529del; S128A, L153P, K324I, F333N, |
| | | K149L, K196D, Y224T, I262K, T276G, Y281T, I336A, V364E |
| PRT-211 | SEQ ID NO: 213 | 1_61DEL AND 380_529del; S128A, L153P, K324I, F333N, |
| | | K149L, G199P, Y224T, I262K, T276G, Y281T, I336A, V364E, |
| | | H174E |
| PRT-212 | SEQ ID NO: 214 | 1_61DEL AND 380_529del; S128A, L153P, K324I, F333N, |
| | | S94E, K116D, K149L, N182D, K196D, Y224T, I262K, T276G, |
| | | Y281T, V303I, I336A, V364E |
| PRT-243 | SEQ ID NO: 251 | 1_61DEL AND 380_529del; T122S, S128A, L153P, F333N, |
| | | K324I, N162E, K229E, H275Y, N219G, H174E, |
| | | 177_183delinsRDNRDN (SEQ ID NO: 919) |
| PRT-213 | SEQ ID NO: 215 | S128A, L153P, K324I, F333N, |
| | | 311_321delinsLSNVEALGYNITSGYSDKRY (SEQ ID NO: 939) |
| PRT-214 | SEQ ID NO: 216 | 1_61DEL AND 380_529del; S128A, L153P, K324I, F333N, |
| | | 310_320delinsFLVFGVTYDGSTPVP (SEQ ID NO: 940) |
| PRT-215 | SEQ ID NO: 217 | 1_61DEL AND 380_529del; S128A, L153P, K324I, F333N, |
| | | 307_322delinsLAKGNNYFGHWHFAVM (SEQ ID NO: 936) |
| PRT-216 | SEQ ID NO: 218 | 1_61DEL AND 380_529del; S128A, L153P, K324I, F333N, |
| | | 86_105delinsDDMEAKGNNYFGHWHFAVATN (SEQ ID NO: 941) |
| PRT-217 | SEQ ID NO: 219 | 1_61DEL AND 380_529del; S128A, L153P, K324I, F333N, |
| | | 271_287delinsVGISGSAGGIKSVDSDGDSYI (SEQ ID NO: 932) |
| PRT-218 | SEQ ID NO: 220 | 1_61DEL AND 380_529del; S128A, L153P, K324I, F333N, |
| | | 91_100delinsGGGGGKSVDSDGDSYGGGGG (SEQ ID NO: 943) |
| PRT-219 | SEQ ID NO: 221 | 1_61DEL AND 380_529del; S128A, L153P, K324I, F333N, |
| | | 308_324delinsTKSVDSDGDSYKINY (SEQ ID NO: 932) |
| PRT-220 | SEQ ID NO: 222 | 1_61DEL AND 380_529del; S128A, L153P, K324I, F333N, |
| | | 311_319delinsLLKPKILGYNITSGYSDEIY (SEQ ID NO: 938) |
| PRT-221 | SEQ ID NO: 223 | 1_61DEL AND 380_529del; S128A, L153P, K324I, F333N, |
| | | 315_317delinsVTYDGST (SEQ ID NO: 946) |
| PRT-222 | SEQ ID NO: 224 | 1_61DEL AND 380_529del; S128A, L153P, K324I, F333N, |
| | | 303_326delinsTGAKGNNYFGHWHFAVRVRL (SEQ ID NO: 933) |
| PRT-223 | SEQ ID NO: 225 | 1_61DEL AND 380_529del; S128A, L153P, K324I, F333N, |
| | | 93_98delinsGGGGGKSVDSDGDSYGGGGG (SEQ ID NO: 943) |
| PRT-224 | SEQ ID NO: 226 | 1_61DEL AND 380_529del; S128A, L153P, K324I, F333N, |
| | | 174_187delinsVMYKGKKLLEAARAGQPDSSE (SEQ ID NO: 945) |
| PRT-225 | SEQ ID NO: 227 | 1_61DEL AND 380_529del; S128A, L153P, K324I, F333N, |
| | | 306_324delinsGHYGVYNGVTYWGHTPLHLAAMLGHLVYGLY (SEQ ID |
| | | NO: 934) |
| PRT-226 | SEQ ID NO: 228 | 1_61DEL AND 380_529del; S128A, L153P, K324I, F333N, |
| | | 306_324delinsQRTPLHLAAWADHLYR (SEQ ID NO: 935) |
| PRT-227 | SEQ ID NO: 229 | 1_61DEL AND 380_529del; S128A, L153P, K324I, F333N, |
| | | 307_324delinsGGFAFDISIDNGNEDVY (SEQ ID NO: 937) |
| PRT-228 | SEQ ID NO: 230 | 1_61DEL AND 380_529del; S128A, L153P, K324I, F333N, |
| | | 88_102delinsGEIVAFDISIDNGNEDLAEILQLSTYDGGG (SEQ ID NO: |
| | | 942) |
| PRT-229 | SEQ ID NO: 231 | 1_61DEL AND 380_529del; S128A, L153P, K324I, F333N, |
| | | 311_321delinsLSNVEALGYNITSGYSDKRY (SEQ ID NO: 939), |
| | | 86_105delinsDDMEAKGNNYFGHWHFAVATN (SEQ ID NO: |
| | | 941), 271_287delinsVGISGSAGGIKSVDSDGDSYI (SEQ ID NO: |
| | | 932) |
| PRT-230 | SEQ ID NO: 232 | 1_61DEL AND 380_529del; S128A, L153P, K324I, F333N, |
| | | 311_321delinsLSNVEALGYNITSGYSDKRY (SEQ ID NO: 939), |
| | | 86_105delinsDDMEAKGNNYFGHWHFAVATN (SEQ ID NO: 941) |
| PRT-231 | SEQ ID NO: 233 | 1_61DEL AND 380_529del; S128A, L153P, K324I, F333N, |
| | | 311_321delinsLSNVEALGYNITSGYSDKRY (SEQ ID NO: 939), |
| | | 91_100delinsGGGGGKSVDSDGDSYGGGGG (SEQ ID NO: 943) |
| PRT-232 | SEQ ID NO: 234 | 1_61DEL AND 380_529del; S128A, L153P, K324I, F333N, |
| | | 311_321delinsLSNVEALGYNITSGYSDKRY (SEQ ID NO: 939), |
| | | 271_287delinsVGISGSAGGIKSVDSDGDSYI (SEQ ID NO: 932) |
| PRT-233 | SEQ ID NO: 235 | 1_61DEL AND 380_529del; S128A, L153P, K324I, F333N, |
| | | 310_320delinsFLVFGVTYDGSTPVP (SEQ ID NO: 940), |
| | | 86_105delinsDDMEAKGNNYFGHWHFAVATN (SEQ ID NO: 941), |
| | | 271_287delinsVGISGSAGGIKSVDSDGDSYI (SEQ ID NO: 932) |
| PRT-234 | SEQ ID NO: 236 | 1_61DEL AND 380_529del; S128A, L153P, K324I, F333N, |
| | | 310_320delinsFLVFGVTYDGSTPVP (SEQ ID NO: 940), |
| | | 86_105delinsDDMEAKGNNYFGHWHFAVATN (SEQ ID NO: 941) |
| PRT-235 | SEQ ID NO: 237 | 1_61DEL AND 380_529del; S128A, L153P, K324I, F333N, |
| | | 310_320delinsFLVFGVTYDGSTPVP (SEQ ID NO: 940), |
| | | 91_100delinsGGGGGKSVDSDGDSYGGGGG (SEQ ID NO: 943) |
| PRT-236 | SEQ ID NO: 238 | 1_61DEL AND 380_529del; S128A, L153P, K324I, F333N, |
| | | 310_320delinsFLVFGVTYDGSTPVP (SEQ ID NO: 940), |
| | | 271_287delinsVGISGSAGGIKSVDSDGDSYI (SEQ ID NO: 932) |
| PRT-237 | SEQ ID NO: 239 | 1_61DEL AND 380_529del; S128A, L153P, K324I, F333N, |
| | | 307_322delinsLAKGNNYFGHWHFAVM (SEQ ID NO: 936), |
| | | 91_100delinsGGGGGKSVDSDGDSYGGGGG (SEQ ID NO: 943) |
| PRT-238 | SEQ ID NO: 240 | 1_61DEL AND 380_529del; S128A, L153P, K324I, F333N, |
| | | 307_322delinsLAKGNNYFGHWHFAVM (SEQ ID NO: 936), |
| | | 271_287delinsVGISGSAGGIKSVDSDGDSYI (SEQ ID NO: 932) |
| PRT-239 | SEQ ID NO: 241 | 1_61DEL AND 380_529del; S128A, L153P, K324I, F333N, |
| | | 308_324delinsTKSVDSDGDSYKINY (SEQ ID NO: 932), |
| | | 86_105delinsDDMEAKGNNYFGHWHFAVATN (SEQ ID NO: 941) |
| PRT-244 | SEQ ID NO: 280 | 1_61DEL AND 380_529del; M117E, S128A, L153P, F333N |
| PRT-245 | SEQ ID NO: 281 | 1_61DEL AND 380_529del; M117F, S128A, L153P, F333N |
| PRT-246 | SEQ ID NO: 282 | 1_61DEL AND 380_529del; S128A, L153P, F333N, E348R |
| PRT-247 | SEQ ID NO: 283 | 1_61DEL AND 380_529del; S128A, L153P, F333N, E347R |
| PRT-248 | SEQ ID NO: 284 | 1_61DEL AND 380_529del; S128A, L153P, F333N, I351R |
| PRT-249 | SEQ ID NO: 285 | 1_61DEL AND 380_529del; S128A, L153P, S220Y, F333N |
| PRT-250 | SEQ ID NO: 286 | 1_61DEL AND 380_529del; S128A, L153P, S221Y, F333N |
| PRT-251 | SEQ ID NO: 287 | 1_61DEL AND 380_529del; S128A, L153P, H275Y, F333N |
| PRT-252 | SEQ ID NO: 288 | 1_61DEL AND 380_529del; S128A, L153P, F333N, |
| | | 200_202NKAdelinsPYLSTKHL (SEQ ID NO: 930) |
| PRT-253 | SEQ ID NO: 289 | 1_61DEL AND 380_529del; M117E, S128A, L153P, H222E, |
| | | F333N, E348R |
| PRT-254 | SEQ ID NO: 290 | 1_61DEL AND 380_529del; C125S, S128A, L153P, K324I, |
| | | F333N |
| PRT-255 | SEQ ID NO: 291 | 1_61DEL AND 380_529del; C125S, S128A, L153P, R280T, |
| | | F333N |
| PRT-256 | SEQ ID NO: 292 | 1_61DEL AND 380_529del; C125S, S128A, L153P, N162E, |
| | | K229E, F333N |
| PRT-257 | SEQ ID NO: 293 | 1_61DEL AND 380_529del; C125S, S128A, L153P, |
| | | K229E, K324I, F333N |
| PRT-258 | SEQ ID NO: 294 | 1_61DEL AND 380_529del; C125S, S128A, L153P, N162E, |
| | | K229E, R280T, K324I, F333N |
| PRT-259 | SEQ ID NO: 295 | 1_61DEL AND 380_529del; S128A, L153P, N162E, K229E, |
| | | K324I, F333N, 177_183KEYQSNKdelinsESDHG (SEQ ID NOs: |
| | | 920 and 921) |
| PRT-260 | SEQ ID NO: 296 | 1_61DEL AND 380_529del; S128A, L153P, N162E, Q180H, |
| | | K183D, K229E, K324I, F333N, 176_178YKEdelinsN |
| PRT-261 | SEQ ID NO: 297 | 1_61DEL AND 380_529del; S128A, L153P, N162E, K229E, |
| | | F313T, S317N, K324I, F333N, |
| | | 177_319KEYQSNKDRdelinsRDNRDN (SEQ ID NOs: 925 and 919) |
| PRT-262 | SEQ ID NO: 298 | 1_61DEL AND 380_529del; S128A, L153P, N162E, K229E, |
| | | K324I, F333N, 177_319KEYQSNKFNDNSKRdelinsRDNRDNIGDE |
| | | (SEQ ID NOs: 926 and 927) |
| PRT-263 | SEQ ID NO: 299 | 1_61DEL AND 380_529del; S128A, L153P, N162E, K229E, |
| | | F313I, N314G, K324I, F333N, |
| | | 177_318KEYQSNKNSKdelinsRDNRDN (SEQ ID NOs: 924 and 919) |
| PRT-264 | SEQ ID NO: 300 | 1_61DEL AND 380_529del; S128A, L153P, N162E, K229E, |
| | | D293G, Q294E, K297R, K324I, F333N, |
| | | 177_183KEYQSNKdelinsRDNRDN (SEQ ID NOs: 920 and 919) |
| PRT-265 | SEQ ID NO: 301 | 1_61DEL AND 380_529del; S128A, L153P, N162E, K229E, |
| | | Q294E, D295K, K324I, F333N, 177_183KEYQSNKdelinsRDNRDN |
| | | (SEQ ID NOs: 920 and 919) |
| PRT-266 | SEQ ID NO: 302 | 1_61DEL AND 380_529del; S128A, L153P, N162E, K229E, |
| | | Q294E, D295N, K297N, K324I, F333N, |
| | | 177_183KEYQSNKdelinsRDNRDN (SEQ ID NOs: 920 and 919) |
| PRT-267 | SEQ ID NO: 303 | 1_61DEL AND 380_529del; S128A, L153P, N162E, K229E, |
| | | K324I, F333N, 177_185KEYQSNKYAdelinsESPNT (SEQ ID NOs: |
| | | 922 and 923) |
| PRT-268 | SEQ ID NO: 304 | 1_61DEL AND 380_529del; S128A, L153P, N162E, K229E, |
| | | K324I, F333N, 180_185QSNKYAdelinsSG (SEQ ID NO: 929) |
| PRT-269 | SEQ ID NO: 305 | 1_61DEL AND 380_529del; S128A, L153P, N162E, K229E, |
| | | K318G, K324I, F333N, 177_317KEYQSNKNDNSdelinsRDNRDN |
| | | (SEQ ID NOs: 928 and 919) |
| PRT-270 | SEQ ID NO: 306 | 1_61DEL AND 380_529del; S128A, L153P, N162E, K229E, |
| | | K324I, F333N, 177_317KEYQSNKNDNSdelinsRDNRDN (SEQ ID |
| | | NOs: 928 and 919) |
| PRT-271 | SEQ ID NO: 307 | 1_61DEL AND 380_529del; S128A, L153P, G199P, K324I, |
| | | F333N |
| PRT-272 | SEQ ID NO: 308 | 1_61DEL AND 380_529del; S128A, L153P, H174E, K324I, |
| | | F333N |
| PRT-273 | SEQ ID NO: 309 | 1_61DEL AND 380_529del; S128A, L153P, I262K, K324I, |
| | | F333N |
| PRT-274 | SEQ ID NO: 310 | 1_61DEL AND 380_529del; S128A, L153P, K324I, F333N, |
| | | I336A |
| PRT-275 | SEQ ID NO: 311 | 1_61DEL AND 380_529del; K116D, S128A, L153P, K324I, |
| | | F333N |
| PRT-276 | SEQ ID NO: 312 | 1_61DEL AND 380_529del; S128A, K149L, L153P, K324I, |
| | | F333N |
| PRT-277 | SEQ ID NO: 313 | 1_61DEL AND 380_529del; S128A, L153P, N182D, K324I, |
| | | F333N |
| PRT-278 | SEQ ID NO: 314 | 1_61DEL AND 380_529del; S94E, S128A, L153P, K324I, |
| | | F333N |
| PRT-279 | SEQ ID NO: 315 | 1_61DEL AND 380_529del; S128A, L153P, T276G, K324I, |
| | | F333N |
| PRT-280 | SEQ ID NO: 316 | 1_61DEL AND 380_529del; S128A, L153P, V270P, K324I, |
| | | F333N |
| PRT-281 | SEQ ID NO: 317 | 1_61DEL AND 380_529del; S128A, L153P, V274G, K324I, |
| | | F333N |
| PRT-282 | SEQ ID NO: 318 | 1_61DEL AND 380_529del; S128A, L153P, V303I, K324I, |
| | | F333N |
| PRT-283 | SEQ ID NO: 319 | 1_61DEL AND 380_529del; S128A, L153P, K324I, F333N, |
| | | V364E |
| PRT-284 | SEQ ID NO: 320 | 1_61DEL AND 380_529del; S128A, L153P, Y224T, K324I, |
| | | F333N |
| PRT-285 | SEQ ID NO: 321 | 1_61DEL AND 380_529del; S128A, L153P, Y281T, K324I, |
| | | F333N |
| PRT-286 | SEQ ID NO: 322 | 1_61DEL AND 380_529del; I84P, S128A, L153P, K324I, |
| | | F333N |
| PRT-287 | SEQ ID NO: 323 | 1_61DEL AND 380_529del; I84G, S128A, L153P, K324I, |
| | | F333N |
| PRT-288 | SEQ ID NO: 324 | 1_61DEL AND 380_529del; V102L, S128A, L153P, K324I, |
| | | F333N |
| PRT-289 | SEQ ID NO: 325 | 1_61DEL AND 380_529del; S128A, L153P, A185T, K324I, |
| | | F333N |
| PRT-290 | SEQ ID NO: 326 | 1_61DEL AND 380_529del; S128A, L153P, N182P, K324I, |
| | | F333N |
| PRT-291 | SEQ ID NO: 327 | 1_61DEL AND 380_529del; S128A, L153P, N242G, K324I, |
| | | F333N |
| PRT-292 | SEQ ID NO: 328 | 1_61DEL AND 380_529del; S128A, L153P, 1301L, K324I, |
| | | F333N |
| PRT-293 | SEQ ID NO: 329 | 1_61DEL AND 380_529del; S128A, L153P, V303Y, K324I, |
| | | F333N |
| PRT-294 | SEQ ID NO: 330 | 1_61DEL AND 380_529del; S128A, L153P, E310D, K324I, |
| | | F333N |
| PRT-295 | SEQ ID NO: 331 | 1_61DEL AND 380_529del; S128A, L153P, H174D, K324I, |
| | | F333N |
| PRT-296 | SEQ ID NO: 332 | 1_61DEL AND 380_529del; S128A, L153P, N173K, K324I, |
| | | F333N |
| PRT-297 | SEQ ID NO: 333 | 1_61DEL AND 380_529del; S128A, L153P, K196Q, K324I, |
| | | F333N |
| PRT-298 | SEQ ID NO: 334 | 1_61DEL AND 380_529del; S128A, L153P, K196L, K324I, |
| | | F333N |
| PRT-299 | SEQ ID NO: 335 | 1_61DEL AND 380_529del; S128A, L153P, K195L, K324I, |
| | | F333N |
| PRT-300 | SEQ ID NO: 336 | 1_61DEL AND 380_529del; S128A, L153P, K195R, K324I, |
| | | F333N |
| PRT-301 | SEQ ID NO: 337 | 1_61DEL AND 380_529del; S128A, L153P, H197R, K324I, |
| | | F333N |
| PRT-302 | SEQ ID NO: 338 | 1_61DEL AND 380_529del; S128A, L153P, H197K, K324I, |
| | | F333N |
| PRT-303 | SEQ ID NO: 339 | 1_61DEL AND 380_529del; S128A, L153P, H197D, K324I, |
| | | F333N |
| PRT-304 | SEQ ID NO: 340 | 1_61DEL AND 380_529del; S128A, L153P, N263D, K324I, |
| | | F333N |
| PRT-305 | SEQ ID NO: 341 | 1_61DEL AND 380_529del; S128A, L153P, H268G, K324I, |
| | | F333N |
| PRT-306 | SEQ ID NO: 342 | 1_61DEL AND 380_529del; S128A, L153P, H268R, K324I, |
| | | F333N |
| PRT-307 | SEQ ID NO: 343 | 1_61DEL AND 380_529del; S128A, L153P, H268S, K324I, |
| | | F333N |
| PRT-308 | SEQ ID NO: 344 | 1_61DEL AND 380_529del; S128A, L153P, T276R, K324I, |
| | | F333N |
| PRT-309 | SEQ ID NO: 345 | 1_61DEL AND 380_529del; S128A, L153P, H275L, K324I, |
| | | F333N |
| PRT-310 | SEQ ID NO: 346 | 1_61DEL AND 380_529del; S128A, L153P, L279G, K324I, |
| | | F333N |
| PRT-311 | SEQ ID NO: 347 | 1_61DEL AND 380_529del; S128A, L153P, L279T, K324I, |
| | | F333N |
| PRT-312 | SEQ ID NO: 348 | 1_61DEL AND 380_529del; S128A, L153P, Y281H, K324I, |
| | | F333N |
| PRT-313 | SEQ ID NO: 349 | 1_61DEL AND 380_529del; S128A, L153P, Y281S, K324I, |
| | | F333N |
| PRT-314 | SEQ ID NO: 350 | 1_61DEL AND 380_529del; S128A, L153P, R282G, K324I, |
| | | F333N |
| PRT-315 | SEQ ID NO: 351 | 1_61DEL AND 380_529del; S128A, L153P, R282N, K324I, |
| | | F333N |
| PRT-316 | SEQ ID NO: 352 | 1_61DEL AND 380_529del; S128A, L153P, K324I, F333D |
| PRT-317 | SEQ ID NO: 353 | 1_61DEL AND 380_529del; S128A, L153P, K324I, L329K, |
| | | F333N |
| PRT-318 | SEQ ID NO: 354 | 1_61DEL AND 380_529del; S128A, L153P, K324I, L329R, |
| | | F333N |
| PRT-319 | SEQ ID NO: 355 | 1_61DEL AND 380_529del; S128A, L153P, L279W, K324I, |
| | | F333N |
| PRT-320 | SEQ ID NO: 356 | 1_61DEL AND 380_529del; S128A, L153P, L279Y, K324I, |
| | | F333N |
| PRT-321 | SEQ ID NO: 357 | 1_61DEL AND 380_529del; D71E, S128A, L153P, R189K, |
| | | K324I, A343Y |
| PRT-322 | SEQ ID NO: 358 | 1_61DEL AND 380_529del; D71E, S94D, S128A, E143D, |
| | | L153P, R189K, Q294E, K324I, F333N, A343Y |
| PRT-323 | SEQ ID NO: 359 | 1_61DEL AND 380_529del; D71E, 184V, S94D, S128A, E143D, |
| | | L153P, R189K, N242G, Q294E, K324I, F333N, A343Y |
| PRT-324 | SEQ ID NO: 360 | 1_61DEL AND 380_529del; D71E, 184V, E86D, H91K, S94D, |
| | | S128A, E143D, L153P, S181D, R189K, N228K, N242G, N243K, |
| | | K244L, G256D, Q294E, K324I, F333N, A343Y |
| PRT-325 | SEQ ID NO: 361 | 1_61DEL AND 380_529del; S128A, L153P, N260A, K324I, |
| | | F333N, K346P, E347N, E374P |
| PRT-326 | SEQ ID NO: 362 | 1_61DEL AND 380_529del; S128A, L153P, V164K, N260A, |
| | | K324I, F333N, K346P, E347N, E374P |
| PRT-327 | SEQ ID NO: 363 | 1_61DEL AND 380_529del; S128A, L153P, F175I, N260A, |
| | | M323L, K324I, F333N, K346P, E347N, E374P |
| PRT-328 | SEQ ID NO: 364 | 1_61DEL AND 380_529del; S128A, R142K, L153P, N260A, |
| | | K324I, F333N, K346P, E347N |
| PRT-329 | SEQ ID NO: 365 | 1_61DEL AND 380_529del; S128A, R142K, L153P, Q232E, |
| | | N260A, K324I, F333N, R337L, K346P, E347N |
| PRT-330 | SEQ ID NO: 366 | 1_61DEL AND 380_529del; S128A, R142K, L153P, Y217W, |
| | | N260A, K324I, F333N, R337L, K346P, E347N |
| PRT-331 | SEQ ID NO: 367 | 1_61DEL AND 380_529del; K115L, S128A, R142K, L153P, |
| | | N260A, K324I, F333N, R337L, K346P, E347N |
| PRT-332 | SEQ ID NO: 368 | 1_61DEL AND 380_529del; S128A, R142K, F148Y, L153P, |
| | | N182D, N260A, S286T, M323L, K324I, F333N, K346P, E347N |
| PRT-338 | SEQ ID NO: 374 | 1_61DEL AND 380_529del; S128A, L153P, N162E, H174E, |
| | | N219G, K229E, N233G, H275Y, K324I, D332K, F333N, |
| | | 177_183KEYQSNKdelinsRDNRDN (SEQ ID NOs: 920 and 919) |
| PRT-339 | SEQ ID NO: 375 | 1_61DEL AND 380_529del; C125S, S128A, L153P, N162E, |
| | | H174E, N219G, K229E, N233G, H275Y, K324I, D332K, F333N, |
| | | 177_183KEYQSNKdelinsRDNRDN (SEQ ID NOs: 920 and 919) |
| PRT-340 | SEQ ID NO: 376 | 1_61DEL AND 380_529del; T122S, S128A, L153P, N162E, |
| | | H174E, N219G, K229E, N233G, H275Y, K324I, D332K, F333N, |
| | | 177_183KEYQSNKdelinsRDNRDN (SEQ ID NOs: 920 and 919) |
| PRT-341 | SEQ ID NO: 377 | 1_61DEL AND 380_529del; T122S, C125S, S128A, L153P, |
| | | N162E, H174E, N219G, K229E, N233G, H275Y, K324I, D332K, |
| | | F333N, 177_183KEYQSNKdelinsRDNRDN (SEQ ID NOs: 920 and |
| | | 919) |
| PRT-342 | SEQ ID NO: 378 | 1_61DEL AND 380_529del; S128A, L153P, N162E, H174E, |
| | | N219G, K229E, H275Y, K324I, F333N, |
| | | 177_183KEYQSNKdelinsRDNRDN (SEQ ID NOs: 920 and 919) |
| PRT-343 | SEQ ID NO: 379 | 1_61DEL AND 380_529del; C125S, S128A, L153P, N162E, |
| | | H174E, N219G, K229E, H275Y, K324I, F333N, |
| | | 177_183KEYQSNKdelinsRDNRDN (SEQ ID NOs: 920 and 919) |
| PRT-344 | SEQ ID NO: 380 | 1_61DEL AND 380_529del; T122S, S128A, L153P, N162E, |
| | | H174E, N219G, K229E, H275Y, K324I, F333N, |
| | | 177_183KEYQSNKdelinsRDNRDN (SEQ ID NOs: 920 and 919) |
| PRT-345 | SEQ ID NO: 381 | 1_61DEL AND 380_529del; T122S, C125S, S128A, L153P, |
| | | N162E, H174E, N219G, K229E, H275Y, K324I, F333N, |
| | | 177_183KEYQSNKdelinsRDNRDN (SEQ ID NOs: 920 and 919) |
| PRT-346 | SEQ ID NO: 382 | 1_61DEL AND 380_529del; S128A, L153P, K324I, F333N, |
| | | 380insENNVADSNKNSEDVEVSSVEFDFLNFKYPKNEDQVSTEDMRLTLKDTNV |
| | | FNQPQVKISFEEQNGNDWKEKDSGTFEEGKKYRLKIDVNKLALKIYGHLSKNKLN |
| | | VIVNGKAVNIQNVVKKDSIETSFTIYSDSIDLEKINYWIDSENNWS (SEQ ID |
| | | NO: 744) |
| PRT-347 | SEQ ID NO: 383 | 1_61DEL AND 380_529del; S128A, L153P, N162E, N219G, |
| | | K229E, K324I, F333N, 177_183KEYQSNKdelinsRDNRDN (SEQ ID |
| | | NOs: 920 and 919) |
| PRT-348 | SEQ ID NO: 384 | 1_61DEL AND 380_529del; S128A, L153P, N162E, N219G, |
| | | K229E, H275Y, K324I, F333N, 177_183KEYQSNKdelinsRDNRDN |
| | | (SEQ ID NOs: 920 and 919) |
| PRT-349 | SEQ ID NO: 385 | 1_61DEL AND 380_529del; T122S, S128A, L153P, N162E, |
| | | N219G, K229E, K324I, F333N, 177_183KEYQSNKdelinsRDNRDN |
| | | (SEQ ID NOs: 920 and 919) |
| PRT-350 | SEQ ID NO: 386 | 1_61DEL AND 380_529del; S128A, L153P, N162E, N219G, |
| | | K229E, H275Y, R280T, K324I, F333N, |
| | | 177_183KEYQSNKdelinsRDNRDN (SEQ ID NOs: 920 and 919) |
| PRT-351 | SEQ ID NO: 387 | 1_61DEL AND 380_529del; T122S, S128A, L153P, N162E, |
| | | N219G, K229E, R280T, K324I, F333N, |
| | | 177_183KEYQSNKdelinsRDNRDN (SEQ ID NOs: 920 and 919) |
| PRT-352 | SEQ ID NO: 388 | 1_61DEL AND 380_529del; D71Q, S128A, L153P, N162E, |
| | | N219G, K229E, K324I, F333N, 177_183KEYQSNKdelinsRDNRDN |
| | | (SEQ ID NOs: 920 and 919) |
| PRT-353 | SEQ ID NO: 389 | 1_61DEL AND 380_529del; T122S, S128A, L153P, N162E, |
| | | N219G, K229E, H275Y, K324I, F333N, |
| | | 177_183KEYQSNKdelinsRDNRDN (SEQ ID NOs: 920 and 919) |
| PRT-354 | SEQ ID NO: 390 | 1_61DEL AND 380_529del; S128A, L153P, N162E, N219G, |
| | | K229E, H275Y, K318S, K324I, F333N, |
| | | 177_183KEYQSNKdelinsRDNRDN (SEQ ID NOs: 920 and 919) |
| PRT-355 | SEQ ID NO: 391 | 1_61DEL AND 380_529del; S128A, L153P, N162E, N219G, |
| | | K229E, K318S, K324I, F333N, 177_183KEYQSNKdelinsRDNRDN |
| | | (SEQ ID NOs: 920 and 919) |
| PRT-356 | SEQ ID NO: 392 | 1_61DEL AND 380_529del; S128A, L153P, N219G, H275Y, |
| | | K324I, F333N, 177_183KEYQSNKdelinsRDNRDN (SEQ ID NOs: |
| | | 920 and 919) |
| PRT-357 | SEQ ID NO: 393 | 1_61DEL AND 380_529del; T122S, S128A, L153P, N219G, |
| | | K324I, F333N, 177_183KEYQSNKdelinsRDNRDN (SEQ ID NOs: |
| | | 920 and 919) |
| PRT-358 | SEQ ID NO: 394 | 1_61DEL AND 380_529del; D71Q, S128A, L153P, N219G, |
| | | K324I, F333N, 177_183KEYQSNKdelinsRDNRDN (SEQ ID NOs: |
| | | 920 and 919) |
| PRT-359 | SEQ ID NO: 395 | 1_61DEL AND 380_529del; S128A, L153P, N162E, N219Q, |
| | | K229E, K324I, F333N, 177_183KEYQSNKdelinsRDNRDN (SEQ ID |
| | | NOs: 920 and 919) |
| PRT-360 | SEQ ID NO: 396 | 1_61DEL AND 380_529del; D71Q, S128A, L153P, N162E, |
| | | N219Q, K229E, K324I, F333N, 177_183KEYQSNKdelinsRDNRDN |
| | | (SEQ ID NOs: 920 and 919) |
| PRT-361 | SEQ ID NO: 397 | 1_61DEL AND 380_529del; S128A, L153P, N162E, N219Q, |
| | | K229E, H275Y, K324I, F333N, 177_183KEYQSNKdelinsRDNRDN |
| | | (SEQ ID NOs: 920 and 919) |
| PRT-362 | SEQ ID NO: 398 | 1_61DEL AND 380_529del; T122S, S128A, L153P, N162E, |
| | | N219Q, K229E, K324I, F333N, 177_183KEYQSNKdelinsRDNRDN |
| | | (SEQ ID NOs: 920 and 919) |
| PRT-363 | SEQ ID NO: 399 | 1_61DEL AND 380_529del; S128A, L153P, N162E, N219Q, |
| | | K229E, H275Y, R280T, K324I, F333N, |
| | | 177_183KEYQSNKdelinsRDNRDN (SEQ ID NOs: 920 and 919) |
| PRT-364 | SEQ ID NO: 400 | 1_61DEL AND 380_529del; T122S, S128A, L153P, N162E, |
| | | N219Q, K229E, R280T, K324I, F333N, |
| | | 177_183KEYQSNKdelinsRDNRDN (SEQ ID NOs: 920 and 919) |
| PRT-365 | SEQ ID NO: 401 | 1_61DEL AND 380_529del; T122S, S128A, L153P, N162E, |
| | | N219Q, K229E, H275Y, K324I, F333N, |
| | | 177_183KEYQSNKdelinsRDNRDN (SEQ ID NOs: 920 and 919) |
| PRT-366 | SEQ ID NO: 402 | 1_61DEL AND 380_529del; S128A, L153P, N162E, N219Q, |
| | | K229E, H275Y, K318S, K324I, F333N, |
| | | 177_183KEYQSNKdelinsRDNRDN (SEQ ID NOs: 920 and 919) |
| PRT-367 | SEQ ID NO: 403 | 1_61DEL AND 380_529del; S128A, L153P, N162E, N219Q, |
| | | K229E, K318S, K324I, F333N, 177_183KEYQSNKdelinsRDNRDN |
| | | (SEQ ID NOs: 920 and 919) |
| PRT-368 | SEQ ID NO: 404 | 1_61DEL AND 380_529del; S128A, L153P, N219Q, H275Y, |
| | | K324I, F333N, 177_183KEYQSNKdelinsRDNRDN (SEQ ID NOs: |
| | | 920 and 919) |
| PRT-369 | SEQ ID NO: 405 | 1_61DEL AND 380_529del; T122S, S128A, L153P, N219Q, |
| | | K324I, F333N, 177_183KEYQSNKdelinsRDNRDN (SEQ ID NOs: |
| | | 920 and 919) |
| PRT-370 | SEQ ID NO: 406 | 1_61DEL AND 380_529del; D71Q, S128A, L153P, N219Q, |
| | | K324I, F333N, 177_183KEYQSNKdelinsRDNRDN (SEQ ID NOs: |
| | | 920 and 919) |
| PRT-371 | SEQ ID NO: 407 | 1_61DEL AND 380_529del; S128A, L153P, N162E, K229E, |
| | | K324I, F333N, 177_183KEYQSNKdelinsRDNRDN (SEQ ID NOs: |
| | | 920 and 919) |
| PRT-372 | SEQ ID NO: 408 | 1_61DEL AND 380_529del; S128A, L153P, N162E, K229E, |
| | | H275Y, K324I, F333N, 177_183KEYQSNKdelinsRDNRDN (SEQ ID |
| | | NOs: 920 and 919) |
| PRT-373 | SEQ ID NO: 409 | 1_61DEL AND 380_529del; T122S, S128A, L153P, N162E, |
| | | K229E, K324I, F333N, 177_183KEYQSNKdelinsRDNRDN (SEQ ID |
| | | NOs: 920 and 919) |
| PRT-374 | SEQ ID NO: 410 | 1_61DEL AND 380_529del; S128A, L153P, N162E, H174E, |
| | | G199P, N219G, K229E, H275Y, K324I, F333N, |
| | | 177_183KEYQSNKdelinsRDNRDN (SEQ ID NOs: 920 and 919) |
| PRT-375 | SEQ ID NO: 411 | 1_61DEL AND 380_529del; S128A, L153P, N162E, H174E, |
| | | G199P, N219G, K229E, I262K, H275Y, K324I, F333N, |
| | | 177_183KEYQSNKdelinsRDNRDN (SEQ ID NOs: 920 and 919) |
| PRT-376 | SEQ ID NO: 412 | 1_61DEL AND 380_529del; S128A, L153P, N162E, H174E, |
| | | G199P, N219G, K229E, H275Y, R282G, K324I, F333N, |
| | | 177_183KEYQSNKdelinsRDNRDN (SEQ ID NOs: 920 and 919) |
| PRT-377 | SEQ ID NO: 413 | 1_61DEL AND 380_529del; K93D, S128A, K150E, L153P, |
| | | N162E, H174E, G199P, N219G, K229E, H275Y, R282G, K324I, |
| | | F333N, 177_183KEYQSNKdelinsRDNRDN (SEQ ID NOs: 920 and |
| | | 919) |
| PRT-378 | SEQ ID NO: 414 | 1_61DEL AND 380_529del; S128A, D139E, L153P, N162E, |
| | | H174E, G199P, N219G, K229E, E241D, H275Y, R282G, K324I, |
| | | F333N, 177_183KEYQSNKdelinsRDNRDN (SEQ ID NOs: 920 and |
| | | 919) |
| PRT-379 | SEQ ID NO: 415 | 1_61DEL AND 380_529del; S128A, L153P, N162E, H174E, |
| | | G199P, N219G, K229E, H275Y, R282G, K324I, F333N, A343K, |
| | | R360L, 177_183KEYQSNKdelinsRDNRDN (SEQ ID NOs: 920 and |
| | | 919) |
| PRT-380 | SEQ ID NO: 416 | 1_61DEL AND 380_529del; S128A, D139E, L153P, N162E, |
| | | H174E, G199P, N219G, K229E, E241D, H275Y, R282G, K324I, |
| | | F333N, A343K, R360L, 177_183KEYQSNKdelinsRDNRDN (SEQ ID |
| | | NOs: 920 and 919) |
| PRT-381 | SEQ ID NO: 417 | 1_61DEL AND 380_529del; K93D, S128A, D139E, K150E, |
| | | L153P, N162E, H174E, G199P, N219G, K229E, E241D, H275Y, |
| | | R282G, K324I, F333N, 177_183KEYQSNKdelinsRDNRDN (SEQ ID |
| | | NOs: 920 and 919) |
| PRT-382 | SEQ ID NO: 418 | 1_61DEL AND 380_529del; K93D, S128A, K150E, L153P, |
| | | N162E, H174E, G199P, N219G, K229E, H275Y, R282G, K324I, |
| | | F333N, A343K, R360L, 177_183KEYQSNKdelinsRDNRDN (SEQ ID |
| | | NOs: 920 and 919) |
| PRT-383 | SEQ ID NO: 419 | 1_61DEL AND 380_529del; S128A, L153P, N162E, H174E, |
| | | G199P, N219G, K229E, I262K, H275Y, R282G, K324I, F333N, |
| | | 177_183KEYQSNKdelinsRDNRDN (SEQ ID NOs: 920 and 919) |
| PRT-384 | SEQ ID NO: 420 | 1_61DEL AND 380_529del; K93D, S128A, K150E, L153P, |
| | | N162E, H174E, G199P, N219G, K229E, I262K, H275Y, R282G, |
| | | K324I, F333N, 177_183KEYQSNKdelinsRDNRDN (SEQ ID NOs: |
| | | 920 and 919) |
| PRT-385 | SEQ ID NO: 421 | 1_61DEL AND 380_529del; S128A, D139E, L153P, N162E, |
| | | H174E, G199P, N219G, K229E, E241D, I262K, H275Y, R282G, |
| | | K324I, F333N, 177_183KEYQSNKdelinsRDNRDN (SEQ ID NOs: |
| | | 920 and 919) |
| PRT-386 | SEQ ID NO: 422 | 1_61DEL AND 380_529del; S128A, L153P, N162E, H174E, |
| | | G199P, N219G, K229E, I262K, H275Y, R282G, K324I, F333N, |
| | | A343K, R360L, 177_183KEYQSNKdelinsRDNRDN (SEQ ID NOs: |
| | | 920 and 919) |
| PRT-387 | SEQ ID NO: 423 | 1_61DEL AND 380_529del; S128A, D139E, L153P, N162E, |
| | | H174E, G199P, N219G, K229E, E241D, I262K, H275Y, R282G, |
| | | K324I, F333N, A343K, R360L, 177_183KEYQSNKdelinsRDNRDN |
| | | (SEQ ID NOs: 920 and 919) |
| PRT-388 | SEQ ID NO: 424 | 1_61DEL AND 380_529del; K93D, S128A, D139E, K150E, |
| | | L153P, N162E, H174E, G199P, N219G, K229E, E241D, I262K, |
| | | H275Y, R282G, K324I, F333N, 177_183KEYQSNKdelinsRDNRDN |
| | | (SEQ ID NOs: 920 and 919) |
| PRT-389 | SEQ ID NO: 425 | 1_61DEL AND 380_529del; K93D, S128A, K150E, L153P, |
| | | N162E, H174E, G199P, N219G, K229E, I262K, H275Y, R282G, |
| | | K324I, F333N, A343K, R360L, 177_183KEYQSNKdelinsRDNRDN |
| | | (SEQ ID NOs: 920 and 919) |
| PRT-390 | SEQ ID NO: 426 | 1_61DEL AND 380_529del; K93D, S128A, D139E, K150E, |
| | | L153P, N162E, H174E, G199P, N219G, K229E, E241D, I262K, |
| | | H275Y, R282G, S306P, K324I, F333N, |
| | | 177_183KEYQSNKdelinsRDNRDN (SEQ ID NOs: 920 and 919) |
| PRT-391 | SEQ ID NO: 427 | 1_61DEL AND 380_529del; K93D, S128A, K150E, L153P, |
| | | N162E, H174E, G199P, N219G, K229E, I262K, H275Y, R282G, |
| | | S306P, K324I, F333N, A343K, R360L, |
| | | 177_183KEYQSNKdelinsRDNRDN (SEQ ID NOs: 920 and 919) |
| PRT-392 | SEQ ID NO: 428 | 1_61DEL AND 380_529del; K93D, S128A, D139E, K150E, |
| | | L153P, N162E, H174E, G199P, N219G, K229E, E241D, I262K, |
| | | H275Y, R282G, S306P, K324I, F333N, A343K, R360L, |
| | | 177_183KEYQSNKdelinsRDNRDN (SEQ ID NOs: 920 and 919) |
| PRT-393 | SEQ ID NO: 429 | 1_61DEL AND 380_529del; K93D, S128A, K150E, L153P, |
| | | N162E, H174E, G199P, N219G, K229E, I262K, H275Y, R282G, |
| | | K324I, F333E, 177_183KEYQSNKdelinsRDNRDN (SEQ ID NOs: |
| | | 920 and 919) |
| PRT-394 | SEQ ID NO: 430 | 1_61DEL AND 380_529del; K93D, S128A, D139E, K150E, |
| | | L153P, N162E, H174E, G199P, N219G, K229E, E241D, I262K, |
| | | H275Y, R282G, K324I, F333E, 177_183KEYQSNKdelinsRDNRDN |
| | | (SEQ ID NOs: 920 and 919) |
| PRT-395 | SEQ ID NO: 431 | 1_61DEL AND 380_529del; K93D, S128A, D139E, K150E, |
| | | L153P, N162E, H174E, G199P, N219G, K229E, E241D, I262K, |
| | | H275Y, R282G, K324I, F333E, A343K, R360L, |
| | | 177_183KEYQSNKdelinsRDNRDN (SEQ ID NOs: 920 and 919) |
| PRT-396 | SEQ ID NO: 432 | 1_61DEL AND 380_529del; K93D, S128A, D139E, K150E, |
| | | L153P, N162E, H174E, G199P, N219G, K229E, E241D, I262K, |
| | | H275Y, R282G, S306P, K324I, F333E, |
| | | 177_183KEYQSNKdelinsRDNRDN (SEQ ID NOs: 920 and 919) |
| PRT-397 | SEQ ID NO: 433 | 1_61DEL AND 380_529del; K93D, S128A, K150E, L153P, |
| | | N162E, H174E, G199P, N219G, K229E, I262K, H275Y, R282G, |
| | | S306P, K324I, F333E, A343K, R360L, |
| | | 177_183KEYQSNKdelinsRDNRDN (SEQ ID NOs: 920 and 919) |
| PRT-398 | SEQ ID NO: 434 | 1_61DEL AND 380_529del; K93D, S128A, D139E, K150E, |
| | | L153P, N162E, H174E, G199P, N219G, K229E, E241D, I262K, |
| | | H275Y, R282G, S306P, K324I, F333E, A343K, R360L, |
| | | 177_183KEYQSNKdelinsRDNRDN (SEQ ID NOs: 920 and 919) |
| PRT-399 | SEQ ID NO: 435 | 1_61DEL AND 380_529del; S128A, L153P, N162E, H174E, |
| | | G199P, N219G, K229E, H275Y, Y281S, K324I, F333N, |
| | | 177_183KEYQSNKdelinsRDNRDN (SEQ ID NOs: 920 and 919) |
| PRT-400 | SEQ ID NO: 436 | 1_61DEL AND 380_529del; K93D, S128A, K150E, L153P, |
| | | N162E, H174E, G199P, N219G, K229E, H275Y, Y281S, K324I, |
| | | F333N, 177_183KEYQSNKdelinsRDNRDN (SEQ ID NOs: 920 and |
| | | 919) |
| PRT-401 | SEQ ID NO: 437 | 1_61DEL AND 380_529del; S128A, D139E, L153P, N162E, |
| | | H174E, G199P, N219G, K229E, E241D, H275Y, Y281S, K324I, |
| | | F333N, 177_183KEYQSNKdelinsRDNRDN (SEQ ID NOs: 920 and |
| | | 919) |
| PRT-402 | SEQ ID NO: 438 | 1_61DEL AND 380_529del; S128A, L153P, N162E, H174E, |
| | | G199P, N219G, K229E, H275Y, Y281S, K324I, F333N, A343K, |
| | | R360L, 177_183KEYQSNKdelinsRDNRDN (SEQ ID NOs: 920 and |
| | | 919) |
| PRT-403 | SEQ ID NO: 439 | 1_61DEL AND 380_529del; S128A, D139E, L153P, N162E, |
| | | H174E, G199P, N219G, K229E, E241D, H275Y, Y281S, K324I, |
| | | F333N, A343K, R360L, 177_183KEYQSNKdelinsRDNRDN (SEQ ID |
| | | NOs: 920 and 919) |
| PRT-404 | SEQ ID NO: 440 | 1_61DEL AND 380_529del; K93D, S128A, D139E, K150E, |
| | | L153P, N162E, H174E, G199P, N219G, K229E, E241D, H275Y, |
| | | Y281S, K324I, F333N, 177_183KEYQSNKdelinsRDNRDN (SEQ ID |
| | | NOs: 920 and 919) |
| PRT-405 | SEQ ID NO: 441 | 1_61DEL AND 380_529del; K93D, S128A, K150E, L153P, |
| | | N162E, H174E, G199P, N219G, K229E, H275Y, Y281S, K324I, |
| | | F333N, A343K, R360L, 177_183KEYQSNKdelinsRDNRDN (SEQ ID |
| | | NOs: 920 and 919) |
| PRT-406 | SEQ ID NO: 442 | 1_61DEL AND 380_529del; S128A, L153P, N162E, H174E, |
| | | G199P, N219G, K229E, I262K, H275Y, Y281S, K324I, F333N, |
| | | 177_183KEYQSNKdelinsRDNRDN (SEQ ID NOs: 920 and 919) |
| PRT-407 | SEQ ID NO: 443 | 1_61DEL AND 380_529del; K93D, S128A, K150E, L153P, |
| | | N162E, H174E, G199P, N219G, K229E, I262K, H275Y, Y281S, |
| | | K324I, F333N, 177_183KEYQSNKdelinsRDNRDN (SEQ ID NOs: |
| | | 920 and 919) |
| PRT-408 | SEQ ID NO: 444 | 1_61DEL AND 380_529del; S128A, D139E, L153P, N162E, |
| | | H174E, G199P, N219G, K229E, E241D, I262K, H275Y, Y281S, |
| | | K324I, F333N, 177_183KEYQSNKdelinsRDNRDN (SEQ ID NOs: |
| | | 920 and 919) |
| PRT-409 | SEQ ID NO: 445 | 1_61DEL AND 380_529del; S128A, L153P, N162E, H174E, |
| | | G199P, N219G, K229E, I262K, H275Y, Y281S, K324I, F333N, |
| | | A343K, R360L, 177_183KEYQSNKdelinsRDNRDN (SEQ ID NOs: |
| | | 920 and 919) |
| PRT-410 | SEQ ID NO: 446 | 1_61DEL AND 380_529del; S128A, D139E, L153P, N162E, |
| | | H174E, G199P, N219G, K229E, E241D, I262K, H275Y, Y281S, |
| | | K324I, F333N, A343K, R360L, 177_183KEYQSNKdelinsRDNRDN |
| | | (SEQ ID NOs: 920 and 919) |
| PRT-411 | SEQ ID NO: 447 | 1_61DEL AND 380_529del; K93D, S128A, D139E, K150E, |
| | | L153P, N162E, H174E, G199P, N219G, K229E, E241D, I262K, |
| | | H275Y, Y281S, K324I, F333N, 177_183KEYQSNKdelinsRDNRDN |
| | | (SEQ ID NOs: 920 and 919) |
| PRT-412 | SEQ ID NO: 448 | 1_61DEL AND 380_529del; K93D, S128A, K150E, L153P, |
| | | N162E, H174E, G199P, N219G, K229E, I262K, H275Y, Y281S, |
| | | K324I, F333N, A343K, R360L, 177_183KEYQSNKdelinsRDNRDN |
| | | (SEQ ID NOs: 920 and 919) |
| PRT-413 | SEQ ID NO: 449 | 1_61DEL AND 380_529del; K93D, S128A, D139E, K150E, |
| | | L153P, N162E, H174E, G199P, N219G, K229E, E241D, I262K, |
| | | H275Y, Y281S, S306P, K324I, F333N, |
| | | 177_183KEYQSNKdelinsRDNRDN (SEQ ID NOs: 920 and 919) |
| PRT-414 | SEQ ID NO: 450 | 1_61DEL AND 380_529del; K93D, S128A, K150E, L153P, |
| | | N162E, H174E, G199P, N219G, K229E, I262K, H275Y, Y281S, |
| | | S306P, K324I, F333N, A343K, R360L, |
| | | 177_183KEYQSNKdelinsRDNRDN (SEQ ID NOs: 920 and 919) |
| PRT-415 | SEQ ID NO: 451 | 1_61DEL AND 380_529del; K93D, S128A, D139E, K150E, |
| | | L153P, N162E, H174E, G199P, N219G, K229E, E241D, I262K, |
| | | H275Y, Y281S, S306P, K324I, F333N, A343K, R360L, |
| | | 177_183KEYQSNKdelinsRDNRDN (SEQ ID NOs: 920 and 919) |
| PRT-416 | SEQ ID NO: 452 | 1_61DEL AND 380_529del; K93D, S128A, K150E, L153P, |
| | | N162E, H174E, G199P, N219G, K229E, I262K, H275Y, Y281S, |
| | | K324I, F333E, 177_183KEYQSNKdelinsRDNRDN (SEQ ID NOs: |
| | | 920 and 919) |
| PRT-417 | SEQ ID NO: 453 | 1_61DEL AND 380_529del; K93D, S128A, D139E, K150E, |
| | | L153P, N162E, H174E, G199P, N219G, K229E, E241D, I262K, |
| | | H275Y, Y281S, K324I, F333E, 177_183KEYQSNKdelinsRDNRDN |
| | | (SEQ ID NOs: 920 and 919) |
| PRT-418 | SEQ ID NO: 454 | 1_61DEL AND 380_529del; K93D, S128A, D139E, K150E, |
| | | L153P, N162E, H174E, G199P, N219G, K229E, E241D, I262K, |
| | | H275Y, Y281S, K324I, F333E, A343K, R360L, |
| | | 177_183KEYQSNKdelinsRDNRDN (SEQ ID NOs: 920 and 919) |
| PRT-419 | SEQ ID NO: 455 | 1_61DEL AND 380_529del; K93D, S128A, D139E, K150E, |
| | | L153P, N162E, H174E, G199P, N219G, K229E, E241D, I262K, |
| | | H275Y, Y281S, S306P, K324I, F333E, |
| | | 177_183KEYQSNKdelinsRDNRDN (SEQ ID NOs: 920 and 919) |
| PRT-420 | SEQ ID NO: 456 | 1_61DEL AND 380_529del; K93D, S128A, K150E, L153P, |
| | | N162E, H174E, G199P, N219G, K229E, I262K, H275Y, Y281S, |
| | | S306P, K324I, F333E, A343K, R360L, |
| | | 177_183KEYQSNKdelinsRDNRDN (SEQ ID NOs: 920 and 919) |
| PRT-421 | SEQ ID NO: 457 | 1_61DEL AND 380_529del; K93D, S128A, D139E, K150E, |
| | | L153P, N162E, H174E, G199P, N219G, K229E, E241D, I262K, |
| | | H275Y, Y281S, S306P, K324I, F333E, A343K, R360L, |
| | | 177_183KEYQSNKdelinsRDNRDN (SEQ ID NOs: 920 and 919) |
| PRT-422 | SEQ ID NO: 458 | 1_61DEL AND 380_529del; K93D, S128A, K150E, L153P, |
| | | N162E, H174E, G199P, N219G, K229E, I262K, H275Y, K324I, |
| | | F333N, 177_183KEYQSNKdelinsRDNRDN (SEQ ID NOs: 920 and |
| | | 919) |
| PRT-423 | SEQ ID NO: 459 | 1_61DEL AND 380_529del; S128A, D139E, L153P, N162E, |
| | | H174E, G199P, N219G, K229E, E241D, I262K, H275Y, K324I, |
| | | F333N, 177_183KEYQSNKdelinsRDNRDN (SEQ ID NOs: 920 and |
| | | 919) |
| PRT-424 | SEQ ID NO: 460 | 1_61DEL AND 380_529del; S128A, L153P, N162E, H174E, |
| | | G199P, N219G, K229E, I262K, H275Y, K324I, F333N, A343K, |
| | | R360L, 177_183KEYQSNKdelinsRDNRDN (SEQ ID NOs: 920 and |
| | | 919) |
| PRT-425 | SEQ ID NO: 461 | 1_61DEL AND 380_529del; S128A, D139E, L153P, N162E, |
| | | H174E, G199P, N219G, K229E, E241D, I262K, H275Y, K324I, |
| | | F333N, A343K, R360L, 177_183KEYQSNKdelinsRDNRDN (SEQ ID |
| | | NOs: 920 and 919) |
| PRT-426 | SEQ ID NO: 462 | 1_61DEL AND 380_529del; K93D, S128A, D139E, K150E, |
| | | L153P, N162E, H174E, G199P, N219G, K229E, E241D, I262K, |
| | | H275Y, K324I, F333N, 177_183KEYQSNKdelinsRDNRDN (SEQ ID |
| | | NOs: 920 and 919) |
| PRT-427 | SEQ ID NO: 463 | 1_61DEL AND 380_529del; K93D, S128A, K150E, L153P, |
| | | N162E, H174E, G199P, N219G, K229E, I262K, H275Y, K324I, |
| | | F333N, A343K, R360L, 177_183KEYQSNKdelinsRDNRDN (SEQ ID |
| | | NOs: 920 and 919) |
| PRT-428 | SEQ ID NO: 464 | 1_61DEL AND 380_529del; K93D, S128A, D139E, K150E, |
| | | L153P, N162E, H174E, G199P, N219G, K229E, E241D, I262K, |
| | | H275Y, S306P, K324I, F333N, 177_183KEYQSNKdelinsRDNRDN |
| | | (SEQ ID NOs: 920 and 919) |
| PRT-429 | SEQ ID NO: 465 | 1_61DEL AND 380_529del; K93D, S128A, K150E, L153P, |
| | | N162E, H174E, G199P, N219G, K229E, I262K, H275Y, S306P, |
| | | K324I, F333N, A343K, R360L, 177_183KEYQSNKdelinsRDNRDN |
| | | (SEQ ID NOs: 920 and 919) |
| PRT-430 | SEQ ID NO: 466 | 1_61DEL AND 380_529del; K93D, S128A, D139E, K150E, |
| | | L153P, N162E, H174E, G199P, N219G, K229E, E241D, I262K, |
| | | H275Y, S306P, K324I, F333N, A343K, R360L, |
| | | 177_183KEYQSNKdelinsRDNRDN (SEQ ID NOs: 920 and 919) |
| PRT-431 | SEQ ID NO: 467 | 1_61DEL AND 380_529del; K93D, S128A, K150E, L153P, |
| | | N162E, H174E, G199P, N219G, K229E, I262K, H275Y, K324I, |
| | | F333E, 177_183KEYQSNKdelinsRDNRDN (SEQ ID NOs: 920 and |
| | | 919) |
| PRT-432 | SEQ ID NO: 468 | 1_61DEL AND 380_529del; K93D, S128A, D139E, K150E, |
| | | L153P, N162E, H174E, G199P, N219G, K229E, E241D, I262K, |
| | | H275Y, K324I, F333E, 177_183KEYQSNKdelinsRDNRDN (SEQ ID |
| | | NOs: 920 and 919) |
| PRT-433 | SEQ ID NO: 469 | 1_61DEL AND 380_529del; K93D, S128A, D139E, K150E, |
| | | L153P, N162E, H174E, G199P, N219G, K229E, E241D, I262K, |
| | | H275Y, K324I, F333E, A343K, R360L, |
| | | 177_183KEYQSNKdelinsRDNRDN (SEQ ID NOs: 920 and 919) |
| PRT-434 | SEQ ID NO: 470 | 1_61DEL AND 380_529del; K93D, S128A, D139E, K150E, |
| | | L153P, N162E, H174E, G199P, N219G, K229E, E241D, I262K, |
| | | H275Y, S306P, K324I, F333E, 177_183KEYQSNKdelinsRDNRDN |
| | | (SEQ ID NOs: 920 and 919) |
| PRT-435 | SEQ ID NO: 471 | 1_61DEL AND 380_529del; K93D, S128A, K150E, L153P, |
| | | N162E, H174E, G199P, N219G, K229E, I262K, H275Y, S306P, |
| | | K324I, F333E, A343K, R360L, 177_183KEYQSNKdelinsRDNRDN |
| | | (SEQ ID NOs: 920 and 919) |
| PRT-436 | SEQ ID NO: 472 | 1_61DEL AND 380_529del; K93D, S128A, D139E, K150E, |
| | | L153P, N162E, H174E, G199P, N219G, K229E, E241D, I262K, |
| | | H275Y, S306P, K324I, F333E, A343K, R360L, |
| | | 177_183KEYQSNKdelinsRDNRDN (SEQ ID NOs: 920 and 919) |
| PRT-437 | SEQ ID NO: 473 | 1_61DEL AND 380_529del; S128A, L153P, N162E, H174E, |
| | | H197D, N219G, K229E, I262K, H275Y, K324I, F333N, |
| | | 177_183KEYQSNKdelinsRDNRDN (SEQ ID NOs: 920 and 919) |
| PRT-438 | SEQ ID NO: 474 | 1_61DEL AND 380_529del; K93D, S128A, K150E, L153P, |
| | | N162E, H174E, H197D, N219G, K229E, I262K, H275Y, K324I, |
| | | F333N, 177_183KEYQSNKdelinsRDNRDN (SEQ ID NOs: 920 and |
| | | 919) |
| PRT-439 | SEQ ID NO: 475 | 1_61DEL AND 380_529del; S128A, D139E, L153P, N162E, |
| | | H174E, H197D, N219G, K229E, E241D, I262K, H275Y, K324I, |
| | | F333N, 177_183KEYQSNKdelinsRDNRDN (SEQ ID NOs: 920 and |
| | | 919) |
| PRT-440 | SEQ ID NO: 476 | 1_61DEL AND 380_529del; S128A, L153P, N162E, H174E, |
| | | H197D, N219G, K229E, I262K, H275Y, K324I, F333N, A343K, |
| | | R360L, 177_183KEYQSNKdelinsRDNRDN (SEQ ID NOs: 920 and |
| | | 919) |
| PRT-441 | SEQ ID NO: 477 | 1_61DEL AND 380_529del; S128A, D139E, L153P, N162E, |
| | | H174E, H197D, N219G, K229E, E241D, I262K, H275Y, K324I, |
| | | F333N, A343K, R360L, 177_183KEYQSNKdelinsRDNRDN (SEQ ID |
| | | NOs: 920 and 919) |
| PRT-442 | SEQ ID NO: 478 | 1_61DEL AND 380_529del; K93D, S128A, D139E, K150E, |
| | | L153P, N162E, H174E, H197D, N219G, K229E, E241D, I262K, |
| | | H275Y, K324I, F333N, 177_183KEYQSNKdelinsRDNRDN (SEQ ID |
| | | NOs: 920 and 919) |
| PRT-443 | SEQ ID NO: 479 | 1_61DEL AND 380_529del; K93D, S128A, K150E, L153P, |
| | | N162E, H174E, H197D, N219G, K229E, I262K, H275Y, K324I, |
| | | F333N, A343K, R360L, 177_183KEYQSNKdelinsRDNRDN (SEQ ID |
| | | NOs: 920 and 919) |
| PRT-444 | SEQ ID NO: 480 | 1_61DEL AND 380_529del; K93D, S128A, D139E, K150E, |
| | | L153P, N162E, H174E, H197D, N219G, K229E, E241D, I262K, |
| | | H275Y, S306P, K324I, F333N, 177_183KEYQSNKdelinsRDNRDN |
| | | (SEQ ID NOs: 920 and 919) |
| PRT-445 | SEQ ID NO: 481 | 1_61DEL AND 380_529del; K93D, S128A, K150E, L153P, |
| | | N162E, H174E, H197D, N219G, K229E, I262K, H275Y, S306P, |
| | | K324I, F333N, A343K, R360L, 177_183KEYQSNKdelinsRDNRDN |
| | | (SEQ ID NOs: 920 and 919) |
| PRT-446 | SEQ ID NO: 482 | 1_61DEL AND 380_529del; K93D, S128A, D139E, K150E, |
| | | L153P, N162E, H174E, H197D, N219G, K229E, E241D, I262K, |
| | | H275Y, S306P, K324I, F333N, A343K, R360L, |
| | | 177_183KEYQSNKdelinsRDNRDN (SEQ ID NOs: 920 and 919) |
| PRT-447 | SEQ ID NO: 483 | 1_61DEL AND 380_529del; K93D, S128A, K150E, L153P, |
| | | N162E, H174E, H197D, N219G, K229E, I262K, H275Y, K324I, |
| | | F333E, 177_183KEYQSNKdelinsRDNRDN (SEQ ID NOs: 920 and |
| | | 919) |
| PRT-448 | SEQ ID NO: 484 | 1_61DEL AND 380_529del; K93D, S128A, D139E, K150E, |
| | | L153P, N162E, H174E, H197D, N219G, K229E, E241D, I262K, |
| | | H275Y, K324I, F333E, 177_183KEYQSNKdelinsRDNRDN (SEQ ID |
| | | NOs: 920 and 919) |
| PRT-449 | SEQ ID NO: 485 | 1_61DEL AND 380_529del; K93D, S128A, D139E, K150E, |
| | | L153P, N162E, H174E, H197D, N219G, K229E, E241D, I262K, |
| | | H275Y, K324I, F333E, A343K, R360L, |
| | | 177_183KEYQSNKdelinsRDNRDN (SEQ ID NOs: 920 and 919) |
| PRT-450 | SEQ ID NO: 486 | 1_61DEL AND 380_529del; K93D, S128A, D139E, K150E, |
| | | L153P, N162E, H174E, H197D, N219G, K229E, E241D, I262K, |
| | | H275Y, S306P, K324I, F333E, 177_183KEYQSNKdelinsRDNRDN |
| | | (SEQ ID NOs: 920 and 919) |
| PRT-451 | SEQ ID NO: 487 | 1_61DEL AND 380_529del; K93D, S128A, K150E, L153P, |
| | | N162E, H174E, H197D, N219G, K229E, I262K, H275Y, S306P, |
| | | K324I, F333E, A343K, R360L, 177_183KEYQSNKdelinsRDNRDN |
| | | (SEQ ID NOs: 920 and 919) |
| PRT-452 | SEQ ID NO: 488 | 1_61DEL AND 380_529del; K93D, S128A, D139E, K150E, |
| | | L153P, N162E, H174E, H197D, N219G, K229E, E241D, I262K, |
| | | H275Y, S306P, K324I, F333E, A343K, R360L, |
| | | 177_183KEYQSNKdelinsRDNRDN (SEQ ID NOs: 920 and 919) |
| PRT-453 | SEQ ID NO: 489 | 1_61DEL AND 380_529del; K93D, S128A, K150E, L153P, |
| | | N162E, H174E, G199P, N219G, K229E, H275Y, K324I, F333N, |
| | | 177_183KEYQSNKdelinsRDNRDN (SEQ ID NOs: 920 and 919) |
| PRT-454 | SEQ ID NO: 490 | 1_61DEL AND 380_529del; S128A, D139E, L153P, N162E, |
| | | H174E, G199P, N219G, K229E, E241D, H275Y, K324I, F333N, |
| | | 177_183KEYQSNKdelinsRDNRDN (SEQ ID NOs: 920 and 919) |
| PRT-455 | SEQ ID NO: 491 | 1_61DEL AND 380_529del; S128A, L153P, N162E, H174E, |
| | | G199P, N219G, K229E, H275Y, K324I, F333N, A343K, R360L, |
| | | 177_183KEYQSNKdelinsRDNRDN (SEQ ID NOs: 920 and 919) |
| PRT-456 | SEQ ID NO: 492 | 1_61DEL AND 380_529del; S128A, D139E, L153P, N162E, |
| | | H174E, G199P, N219G, K229E, E241D, H275Y, K324I, F333N, |
| | | A343K, R360L, 177_183KEYQSNKdelinsRDNRDN (SEQ ID NOs: |
| | | 920 and 919) |
| PRT-457 | SEQ ID NO: 493 | 1_61DEL AND 380_529del; K93D, S128A, D139E, K150E, |
| | | L153P, N162E, H174E, G199P, N219G, K229E, E241D, H275Y, |
| | | K324I, F333N, 177_183KEYQSNKdelinsRDNRDN (SEQ ID NOs: |
| | | 920 and 919) |
| PRT-458 | SEQ ID NO: 494 | 1_61DEL AND 380_529del; K93D, S128A, K150E, L153P, |
| | | N162E, H174E, G199P, N219G, K229E, H275Y, K324I, F333N, |
| | | A343K, R360L, 177_183KEYQSNKdelinsRDNRDN (SEQ ID NOs: |
| | | 920 and 919) |
| PRT-459 | SEQ ID NO: 495 | 1_61DEL AND 380_529del; S128A, D139E, L153P, N162E, |
| | | N219G, K229E, H275Y, K324I, F333N, |
| | | 177_183KEYQSNKdelinsRDNRDN (SEQ ID NOs: 920 and 919) |
| PRT-460 | SEQ ID NO: 496 | 1_61DEL AND 380_529del; S128A, L153P, N162E, N219G, |
| | | K229E, E241D, H275Y, K324I, F333N, |
| | | 177_183KEYQSNKdelinsRDNRDN (SEQ ID NOs: 920 and 919) |
| PRT-461 | SEQ ID NO: 497 | 1_61DEL AND 380_529del; S128A, L153P, N162E, N219G, |
| | | K229E, H275Y, K324I, F333N, A343K, |
| | | 177_183KEYQSNKdelinsRDNRDN (SEQ ID NOs: 920 and 919) |
| PRT-462 | SEQ ID NO: 498 | 1_61DEL AND 380_529del; S128A, L153P, N162E, N219G, |
| | | K229E, H275Y, K324I, F333E, 177_183KEYQSNKdelinsRDNRDN |
| | | (SEQ ID NOs: 920 and 919) |
| PRT-463 | SEQ ID NO: 499 | 1_61DEL AND 380_529del; S128A, L153P, N162E, N219G, |
| | | K229E, H275Y, R282G, K324I, F333N, |
| | | 177_183KEYQSNKdelinsRDNRDN (SEQ ID NOs: 920 and 919) |
| PRT-464 | SEQ ID NO: 500 | 1_61DEL AND 380_529del; S128A, L153P, N162E, H197D, |
| | | N219G, K229E, H275Y, K324I, F333N, |
| | | 177_183KEYQSNKdelinsRDNRDN (SEQ ID NOs: 920 and 919) |
| PRT-465 | SEQ ID NO: 501 | 1_61DEL AND 380_529del; S128A, L153P, N162E, N219G, |
| | | K229E, H275Y, K324I, F333N, R360L, |
| | | 177_183KEYQSNKdelinsRDNRDN (SEQ ID NOs: 920 and 919) |
| PRT-466 | SEQ ID NO: 502 | 1_61DEL AND 380_529del; S128A, L153P, N162E, N219G, |
| | | K229E, I262K, H275Y, K324I, F333N, |
| | | 177_183KEYQSNKdelinsRDNRDN (SEQ ID NOs: 920 and 919) |
| PRT-467 | SEQ ID NO: 503 | 1_61DEL AND 380_529del; S128A, L153P, N162E, G199P, |
| | | N219G, K229E, H275Y, K324I, F333N, |
| | | 177_183KEYQSNKdelinsRDNRDN (SEQ ID NOs: 920 and 919) |
| PRT-468 | SEQ ID NO: 504 | 1_61DEL AND 380_529del; S128A, L153P, N162E, N219G, |
| | | K229E, H275Y, Y281S, K324I, F333N, |
| | | 177_183KEYQSNKdelinsRDNRDN (SEQ ID NOs: 920 and 919) |
| PRT-469 | SEQ ID NO: 505 | 1_61DEL AND 380_529del; K93D, S128A, L153P, N162E, |
| | | N219G, K229E, H275Y, K324I, F333N, |
| | | 177_183KEYQSNKdelinsRDNRDN (SEQ ID NOs: 920 and 919) |
| PRT-470 | SEQ ID NO: 506 | 1_61DEL AND 380_529del; S128A, L153P, N162E, N219G, |
| | | K229E, H275Y, S306P, K324I, F333N, |
| | | 177_183KEYQSNKdelinsRDNRDN (SEQ ID NOs: 920 and 919) |
| PRT-471 | SEQ ID NO: 507 | 1_61DEL AND 380_529del; S128A, K150E, L153P, N162E, |
| | | N219G, K229E, H275Y, K324I, F333N, |
| | | 177_183KEYQSNKdelinsRDNRDN (SEQ ID NOs: 920 and 919) |
| PRT-472 | SEQ ID NO: 508 | 1_61DEL AND 380_529del; S128A, L153P, N162E, H174E, |
| | | K196S, N219G, K229E, H275Y, K318A, K324I, F333N, |
| | | 177_183KEYQSNKdelinsRDNRDN (SEQ ID NOs: 920 and 919) |
| PRT-473 | SEQ ID NO: 509 | 1_61DEL AND 380_529del; S128A, L153P, N162E, H174E, |
| | | N219G, H222Q, K229E, H275Y, R280E, K324I, F333N, |
| | | 177_183KEYQSNKdelinsRDNRDN (SEQ ID NOs: 920 and 919) |
| PRT-474 | SEQ ID NO: 510 | 1_61DEL AND 380_529del; S128A, L153P, N162E, H174E, |
| | | K196S, N219G, H222Q, K229E, H275Y, R280E, K318A, K324I, |
| | | F333N, 177_183KEYQSNKdelinsRDNRDN (SEQ ID NOs: 920 and |
| | | 919) |
| PRT-475 | SEQ ID NO: 511 | 1_61DEL AND 380_529del; S128A, L153P, N162E, H174E, |
| | | N219G, K229E, H275Y, K324I, D332K, F333N, |
| | | 177_183KEYQSNKdelinsRDNRDN (SEQ ID NOs: 920 and 919) |
| PRT-476 | SEQ ID NO: 512 | 1_61DEL AND 380_529del; S128A, L153P, N162E, H174E, |
| | | N219G, K229E, N233G, H275Y, K324I, F333N, |
| | | 177_183KEYQSNKdelinsRDNRDN (SEQ ID NOs: 920 and 919) |
| PRT-477 | SEQ ID NO: 513 | 1_61DEL AND 380_529del; S128A, L153P, N162E, H174E, |
| | | N219G, K229E, I254R, H275Y, K324I, F333N, |
| | | 177_183KEYQSNKdelinsRDNRDN (SEQ ID NOs: 920 and 919) |
| PRT-478 | SEQ ID NO: 514 | 1_61DEL AND 380_529del; S128A, L153P, N162E, H174E, |
| | | N219G, K229E, H275Y, K324I, F333N, E363K, |
| | | 177_183KEYQSNKdelinsRDNRDN (SEQ ID NOs: 920 and 919) |
| PRT-479 | SEQ ID NO: 515 | 1_61DEL AND 380_529del; S128A, L153P, N162E, H174E, |
| | | N219G, K229E, H275Y, K324I, F333N, E366K, |
| | | 177_183KEYQSNKdelinsRDNRDN (SEQ ID NOs: 920 and 919) |
| PRT-480 | SEQ ID NO: 516 | 1_61DEL AND 380_529del; S128A, L153P, N162E, H174E, |
| | | N219G, K229E, H275Y, K324I, F333N, E347N, |
| | | 177_183KEYQSNKdelinsRDNRDN (SEQ ID NOs: 920 and 919) |
| PRT-481 | SEQ ID NO: 517 | 1_61DEL AND 380_529del; T122S, S128A, L153P, N162E, |
| | | H174E, K196S, N219G, K229E, H275Y, K318A, K324I, F333N, |
| | | 177_183KEYQSNKdelinsRDNRDN (SEQ ID NOs: 920 and 919) |
| PRT-482 | SEQ ID NO: 518 | 1_61DEL AND 380_529del; T122S, S128A, L153P, N162E, |
| | | H174E, N219G, H222Q, K229E, H275Y, R280E, K324I, F333N, |
| | | 177_183KEYQSNKdelinsRDNRDN (SEQ ID NOs: 920 and 919) |
| PRT-483 | SEQ ID NO: 519 | 1_61DEL AND 380_529del; T122S, S128A, L153P, N162E, |
| | | H174E, K196S, N219G, H222Q, K229E, H275Y, R280E, K318A, |
| | | K324I, F333N, 177_183KEYQSNKdelinsRDNRDN (SEQ ID NOs: |
| | | 920 and 919) |
| PRT-484 | SEQ ID NO: 520 | 1_61DEL AND 380_529del; S128A, L153P, N162E, H174E, |
| | | N219G, K229E, H275Y, K324I, F333N, E363K, E366K, |
| | | 177_183KEYQSNKdelinsRDNRDN (SEQ ID NOs: 920 and 919) |
| PRT-485 | SEQ ID NO: 521 | 1_61DEL AND 380_529del; S128A, L153P, N162E, H174E, |
| | | N219G, K229E, H275Y, K324I, D332K, F333N, E347N, |
| | | 177_183KEYQSNKdelinsRDNRDN (SEQ ID NOs: 920 and 919) |
| PRT-486 | SEQ ID NO: 522 | 1_61DEL AND 380_529del; S128A, L153P, N162E, H174E, |
| | | N219G, K229E, I254R, H275Y, K324I, D332K, F333N, E347N, |
| | | E363K, E366K, 177_183KEYQSNKdelinsRDNRDN (SEQ ID NOs: |
| | | 920 and 919) |
| PRT-487 | SEQ ID NO: 523 | 1_61DEL AND 380_529del; C125S, S128A, L153P, N162E, |
| | | H174E, N219G, K229E, H275Y, K324I, F333N, |
| | | 177_183KEYQSNKdelinsRDNRDN (SEQ ID NOs: 920 and 919) |
| PRT-488 | SEQ ID NO: 524 | 1_61DEL AND 380_529del; S128A, D152N, L153P, N162E, |
| | | H174E, N219G, K229E, H275Y, K324I, F333N, |
| | | 177_183KEYQSNKdelinsRDNRDN (SEQ ID NOs: 920 and 919) |
| PRT-489 | SEQ ID NO: 525 | 1_61DEL AND 380_529del; S128A, L153P, N162E, H174E, |
| | | N219G, K229E, H275Y, K324I, F333E, |
| | | 177_183KEYQSNKdelinsRDNRDN (SEQ ID NOs: 920 and 919) |
| PRT-490 | SEQ ID NO: 526 | 1_61DEL AND 380_529del; S128A, L153P, N162E, H174E, |
| | | H197D, N219G, K229E, H275Y, K324I, F333N, |
| | | 177_183KEYQSNKdelinsRDNRDN (SEQ ID NOs: 920 and 919) |
| PRT-491 | SEQ ID NO: 527 | 1_61DEL AND 380_529del; S128A, L153P, N162E, H174E, |
| | | N219G, K229E, N233G, H275Y, K324I, D332K, F333N, |
| | | 177_183KEYQSNKdelinsRDNRDN (SEQ ID NOs: 920 and 919) |
| PRT-492 | SEQ ID NO: 528 | 1_61DEL AND 380_529del; S128A, L153P, N162E, N219Q, |
| | | K229E, R280T, K324I, F333N |
| PRT-493 | SEQ ID NO: 737 | 1_61DEL AND 380_529del; S128A, L153P, N162E, N219Q, |
| | | K229E, R280T, D307N, K324I, F333N |

TABLE 3B

| | | Mutation(s) or deletions |
|---|---|---|
| ID | Polypeptide Seq | (as compared to SEQ ID NO: 2) |
| PRT-242 | SEQ ID NO; 247 | 1_50del and 371_520del |
| PRT-240 | SEQ ID NO: 242 | 1_50del and 371_520del; S187K |
| PRT-241 | SEQ ID NO: 243 | 1_50del and 371_520del; Q157E, S187K |

[0075] In some embodiments, the polypeptide having protease activity comprises an amino acid sequence having at least 50%, at least 60%, at least 70%, at least 80%, at least 81%, at least 82%, at least 83%, at least 84%, at least 85%, at least 86%, at least 87%, at least 88%, at least 89%, at least 90%, at least 91%, at least 92%, at least 93%, at least 94%, at least 95%, at least 96%, at least 97%, at least 98%, or at least 99% sequence identity to any one of SEQ ID NO: 380, 251, 5-243, 247, 280-379, 381-528, 737, 745-823, 828-864, or 885-916, provided that the amino acid sequence comprises a cysteine (C) at a position in the polypeptide that corresponds to position 125 of SEQ ID NO: 1, a histidine (H) at a position in the polypeptide that corresponds to position 283 of SEQ ID NO: 1, an aspartic acid (D) at a position in the polypeptide that corresponds to position 305 of SEQ ID NO: 1, an aspartic acid (D) at a position in the polypeptide that corresponds to position 307 of SEQ ID NO: 1, and/or a lysine (K) at a position in the polypeptide that corresponds to position 115 of SEQ ID NO: 1, and wherein X comprises a Methionine (M), a signal peptide, or is absent.

[0076] In some embodiments, the polypeptide having protease activity comprises an amino acid sequence having at least 50%, at least 60%, at least 70%, at least 80%, at least 81%, at least 82%, at least 83%, at least 84%, at least 85%, at least 86%, at least 87%, at least 88%, at least 89%, at least 90%, at least 91%, at least 92%, at least 93%, at least 94%, at least 95%, at least 96%, at least 97%, at least 98%, or at least 99% sequence identity to any one of SEQ ID NO: 380, 251, 5-243, 247, 280-379, 381-528, 737, 745-823, 828-864, or 885-916, provided that: 1) the amino acid sequence comprises any one mutation selected from Table 3A or Table 3B; and 2) the amino acid sequence comprises a cysteine (C) at a position in the polypeptide that corresponds to position 125 of SEQ ID NO: 1, a histidine (H) at a position in the polypeptide that corresponds to position 283 of SEQ ID NO: 1, an aspartic acid (D) at a position in the polypeptide that corresponds to position 305 of SEQ ID NO: 1, an aspartic acid (D) at a position in the polypeptide that corresponds to position 307 of SEQ ID NO: 1, and/or a lysine (K) at a position in the polypeptide that corresponds to position 115 of SEQ ID NO: 1, and wherein X comprises a Methionine (M), a signal peptide, or is absent.

[0077] In some embodiments, the polypeptide has the amino acid sequence of:

(SEQ ID NO: 738)
TALGRRKAEDRIKETLWADGVKIDEKDFEHIKSSHEDYFAVEYGKG
SGYYDVNKKMDSEDTALCVGX₁₂₈VVTNMFHWWVDQNRENIEKFKKQ
DX₁₅₃ENNGVMKFX₁₆₂GVKEATVDELNHFYKEYQSNKYADQSRFFDL
IKKHFGNKALNPEELFELYFNGFYYNSSHRYIEDNX₂₂₉PAQNNLFS
KVLENNKLLNPERSYGIDGFSNNVINALKSHKVLGLVHTTPLRYRH
IISMWGADIDQDGKVKAIYVTDSDDREITFNDNSKRRIGMX₃₂₄RYD
VLVDDX₃₃₃GNIRFTGKGATHKEEGAIYAGLYSLSRGDEVWEDYFKK
YPEVQENL,

wherein at least one X₁₂₈, X₁₅₃, X₁₆₂, X₂₂₉, X₃₂₄, and X₃₃₃ is mutated as compared to SEQ ID NO: 1. In some embodiments, the polypeptide has the amino acid sequence of SEQ ID NO: 738, wherein at least one of X₁₂₈, X₁₅₃, X₁₆₂, X₂₂₉, X₃₂₄, and X₃₃₃ is mutated as compared to SEQ ID NO: 1.

[0078] In some embodiments, the polypeptide has the amino acid sequence of:

(SEQ ID NO: 739)
TALGRRKAEDRIKETLWADGVKIDEKDFEHIKSSHEDYFAVEYGKG
SGYYDVNKKMDSEDTALCVGX₁₂₈VVTNMFHWWVDQNRENIEKFKKQ
DX₁₅₃ENNGVMKFX₁₆₂GVKEATVDELNX₁₇₄FYX₁₇₇YADQSRFFDLIK
KHFGNKALNPEELFELYFNGFYYX₂₁₉SSHRYIEDNX₂₂₉PAQNNLFS
KVLENNKLLNPERSYGIDGFSNNVINALKSHKVLGLVX₂₇₅TTPLRY
RHIISMWGADIDQDGKVKAIYVTDSDDREITFNDNSKRRIGMX₃₂₄R
YDVLVDDX₃₃₃GNIRFTGKGATHKEEGAIYAGLYSLSRGDEVWEDYF
KKYPEVQENL,

wherein at least one X₁₂₈, X₁₅₃, X₁₆₂, X₁₇₄, X₁₇₇, X₂₁₉, X₂₂₉, X₂₇₅, X₃₂₄, and X₃₃₃ is mutated as compared to SEQ ID NO: 1. In some embodiments, the polypeptide has the amino acid sequence of SEQ ID NO: 739, wherein at least one of X₁₂₈, X₁₅₃, X₁₆₂, X₁₇₄, X₁₇₇, X₂₁₉, X₂₂₉, X₂₇₅, X₃₂₄, and X₃₃₃ is mutated as compared to SEQ ID NO: 1.

[0079] In some embodiments, the polypeptide has the amino acid sequence of:

(SEQ ID NO: 740)
TALGRRKAEDRIKETLWADGVKIDEKDFEHIX₉₃SSHEDYFAVEYGK
GSGYYDVNKKMDSEDX₁₂₂ALCVGX₁₂₈VVTNMFHWWVDQNRENIEKF
KX₁₅₀QDX₁₅₃ENNGVMKFX₁₆₂GVKEATVDELNX₁₇₄FYX₁₇₇YADQSRF
FDLIKKHFX₁₉₉NKALNPEELFELYFNGFYYX₂₁₉SSHRYIEDNX₂₂₉P
AQNNLFSKVLX₂₄₁NNKLLNPERSYGIDGFSNNVX262NALKSHKVLG
LVX₂₇₅TTPLRYRHIISMWGADIDQDGKVKAIYVTDSDDREITFNDN
SKRRIGMX₃₂₄RYDVLVDDX₃₃₃GNIRFTGKGATHKEEGAIYAGLYSL
SRGDEVWEDYFKKYPEVQENL,

wherein at least one X₉₃, X₁₂₂, X₁₂₈, X₁₅₀, X₁₅₃, X₁₆₂, X₁₇₄, X₁₇₇, X₁₉₉, X₂₁₉, X₂₂₉, X₂₄₁, X₂₇₅, X₃₂₄, and X₃₃₃ is mutated as compared to SEQ ID NO: 1. In some embodiments, the polypeptide has the amino acid sequence of SEQ ID NO: 740, wherein at least one of X₉₃, X₁₂₂, X₁₂₈, X₁₅₀, X₁₅₃, X₁₆₂, X₁₇₄, X₁₇₇, X₁₉₉, X₂₁₉, X₂₂₉, X₂₄₁, X₂₇₅, X₃₂₄, and X₃₃₃ is mutated as compared to SEQ ID NO: 1.

[0080] In some embodiments, the polypeptide has the amino acid sequence of:

(SEQ ID NO: 741)
TALGRRKAEDRIKETLWADGVKIDEKDFEHIX₉₃SSHEDYFAVEYGK
GSGYYDVNKKMDSEDX₁₂₂ALCVGX₁₂₈VVTNMFHWWVX₁₃₉QNRENIE
KFKX₁₅₀QDX₁₅₃ENNGVMKFX₁₆₂GVKEATVDELNX₁₇₄FYX₁₇₇YADQS
RFFDLIKX₁₉₆HFX₁₉₉NKALNPEELFELYFNGFYYX₂₁₉SSX₂₂₂RYIE
DNX₂₂₉PAQNNLFSKVLX₂₄₁NNKLLNPERSYGIDGFSNNVX₂₆₂NALK
SHKVLGLVX₂₇₅TTPLX₂₈₀YRHIISMWGADIDQDGKVKAIYVTDSDD
REITFNDNSKRRIGMX₃₂₄RYDVLVDDX₃₃₃GNIRFTGKGX₃₄₃THKEE
GAIYAGLYSLSX₃₆₀GDEVWEDYFKKYPEVQENL,

wherein at least one X₉₃, X₁₂₂, X₁₂₈, X₁₃₉, X₁₅₀, X₁₅₃, X₁₆₂, X₁₇₄, X₁₇₇, X₁₉₆, X₁₉₉, X₂₁₉, X₂₂₂, X₂₂₉, X₂₄₁, X₂₆₂, X₂₇₅, X₂₈₀, X₃₂₄, X₃₃₃, X₃₄₃, and X₃₆₀ is mutated as compared to SEQ ID NO: 1. In some embodiments, the polypeptide has the amino acid sequence of SEQ ID NO: 741, wherein at least one of X₉₃, X₁₂₂, X₁₂₈, X₁₃₉, X₁₅₀, X₁₅₃, X₁₆₂, X₁₇₄, X₁₇₇, X₁₉₆, X₁₉₉, X₂₁₉, X₂₂₂, X₂₂₉, X₂₄₁, X₂₆₂, X₂₇₅, X₂₈₀, X₃₂₄, X₃₃₃, X₃₄₃, and X₃₆₀ is mutated as compared to SEQ ID NO: 1.

[0081] In some embodiments, the polypeptide has the amino acid sequence of:

(SEQ ID NO: 917)
X₁TALGRRKAEDRIKETLWADGVKIDEKDFEHIX₉₃SSHEDYFAVEY
GKGSGYYDVNKKMDSEDX₁₂₂ALCVGX₁₂₈VVTNMFHWWVX₁₃₉QNREN
IEKFKX₁₅₀QDX₁₅₃ENNGVMKFX₁₆₂GVKEATVDELNX₁₇₄FYX₁₇₇YAD
QSRFFDLIKX₁₉₆HFX₁₉₉NKALNPEELFELYFNGFYYX₂₁₉SSX₂₂₂RY
IEDNX₂₂₉PAQNNLFSKVLX₂₄₁NNKLLNPERSYGIDGFSNNVX₂₆₂NA
LKSHKVLGLVX₂₇₅TTPLX₂₈₀YRHIISMWGADIDQDGKVKAIYVTDS
DDREITFNDNSKRRIGMX₃₂₄RYDVLVDDX₃₃₃GNIRFTGKGX₃₄₃THK
EEGAIYAGLYSLSX₃₆₀GDEVWEDYFKKYPEVQENLX₃₈₀,

at least one X₉₃, X₁₂₂, X₁₂₈, X₁₃₉, X₁₅₀, X₁₅₃, X₁₆₂, X₁₇₄, X₁₇₇, X₁₉₆, X₁₉₉, X₂₁₉, X₂₂₂, X₂₂₉, X₂₄₁, X₂₆₂, X₂₇₅, X₂₈₀, X₃₂₄, X₃₃₃, X₃₄₃, and X₃₆₀ is mutated as compared to SEQ ID NO: 1, wherein X₃₈₀ is either SEQ ID NO: 744, or is absent, and wherein X₁ is SEQ ID NO: 248, or is absent.

[0082] In some embodiments, X₉₃, X₁₂₂, X₁₂₈, X₁₃₉, X₁₅₀, X₁₅₃, X₁₆₂, X₁₇₄, X₁₇₇, X₁₉₆, X₁₉₉, X₂₁₉, X₂₂₂, X₂₂₉, X₂₄₁, X₂₆₂, X₂₇₅, X₂₈₀, X₃₂₄, X₃₃₃, X₃₄₃, and X₃₆₀ is any amino acid, provided that at least one of X₉₃, X₁₂₂, X₁₂₈, X₁₃₉, X₁₅₀, X₁₅₃, X₁₆₂, X₁₇₄, X₁₇₇, X₁₉₆, X₁₉₉, X₂₁₉, X₂₂₂, X₂₂₉, X₂₄₁, X₂₆₂, X₂₇₅, X₂₈₀, X₃₂₄, X₃₃₃, X₃₄₃, and X₃₆₀ is mutated as compared to SEQ ID NO: 1. In some embodiments, at least one of X₉₃, X₁₂₂, X₁₂₈, X₁₃₉, X₁₅₀, X₁₅₃, X₁₆₂, X₁₇₄, X₁₇₇, X₁₉₆, X₁₉₉, X₂₁₉, X₂₂₂, X₂₂₉, X₂₄₁, X₂₆₂, X₂₇₅, X₂₈₀, X₃₂₄, X₃₃₃, X₃₄₃, and X₃₆₀ is not a wild-type residue as compared to SEQ ID NO: 1. In some embodiments, X₉₃, X₁₂₂, X₁₂₈, X₁₃₉, X₁₅₀, X₁₅₃, X₁₆₂, X₁₇₄, X₁₇₇, X₁₉₆, X₁₉₉, X₂₁₉, X₂₂₂, X₂₂₉, X₂₄₁, X₂₆₂, X₂₇₅, X₂₈₀, X₃₂₄, X₃₃₃, X₃₄₃, and X₃₆₀ is any amino acid, provided that at least one of X₉₃, X₁₂₂, X₁₂₈, X₁₃₉, X₁₅₀, X₁₅₃, X₁₆₂, X₁₇₄, X₁₇₇, X₁₉₆, X₁₉₉, X₂₁₉, X₂₂₂, X₂₂₉, X₂₄₁, X₂₆₂, X₂₇₅, X₂₈₀, X₃₂₄, X₃₃₃, X₃₄₃, and X₃₆₀ is not a wild-type residue as compared to SEQ ID NO: 1.

[0083] In some embodiments, X₉₃ is aspartic acid (D). In some embodiments, X₁₂₂ is serine(S). In some embodiments, X₁₂₈ is alanine (A). In some embodiments, X₁₃₉ is glutamic acid (E). In some embodiments, X₁₅₀ is glutamic acid (E). In some embodiments, X₁₅₃ is proline (P). In some embodiments, X₁₆₂ is glutamic acid (E). In some embodiments, X₁₇₄ is glutamic acid (E). In some embodiments, X₁₇₇ is an amino acid sequence KEYQSNK (SEQ ID NO: 742), or an amino acid sequence RDNRDN (SEQ ID NO: 743). In some embodiments, X₁₇₇ is an amino acid sequence RDNRDN (SEQ ID NO: 743). In some embodiments, X₁₇₇ is an amino acid sequence KEYQSNK (SEQ ID NO: 742). In some embodiments, X₁₉₆ is serine(S). In some embodiments, X₁₉₉ is proline (P). In some embodiments, X₂₁₉ is glycine (G). In some embodiments, X₂₂₂ is glutamine (Q). In some embodiments, X₂₂₉ is glutamic acid (E). In some embodiments, X₂₄₁ is aspartic acid (D). In some embodiments, X₂₆₂ is lysine (K). In some embodiments, X₂₇₅ is tyrosine (Y). In some embodiments, X₂₈₀ is threonine (T). In some embodiments, X₃₂₄ is isoleucine (I). In some embodiments, X₃₃₃ is asparagine (N). In some embodiments, X₃₄₃ is lysine (K). In some embodiments, X₃₆₀ is leucine (L).

[0084] In some embodiments, X₁₅₃ is proline (P), and X₁₂₈ is alanine (A). In some embodiments, X₁₅₃ is proline (P), X₁₂₈ is alanine (A), and X₃₃₃ is asparagine (N). In some embodiments, X₁₅₃ is proline (P), X₁₂₈ is alanine (A), X₃₃₃ is asparagine (N), and X₃₂₄ is isoleucine (I). In some embodiments, X₁₅₃ is proline (P), X₁₂₈ is alanine (A), X₃₃₃ is asparagine (N), X₃₂₄ is isoleucine (I), and X₁₆₂ is glutamic acid (E). In some embodiments, X₁₅₃ is proline (P), X₁₂₈ is alanine (A), X₃₃₃ is asparagine (N), X₃₂₄ is isoleucine (I), X₁₆₂ is glutamic acid (E), and X₂₂₉ is glutamic acid (E). In some embodiments, X₁₅₃ is proline (P), X₁₂₈ is alanine (A), X₃₃₃ is asparagine (N), X₃₂₄ is isoleucine (I), and X₂₂₉ is glutamic acid (E). In some embodiments, X₁₅₃ is proline (P), X₁₂₈ is alanine (A), X₃₃₃ is asparagine (N), and X₁₆₂ is glutamic acid (E). In some embodiments, X₁₅₃ is proline (P), X₁₂₈ is alanine (A), X₃₃₃ is asparagine (N), X₁₆₂ is glutamic acid (E), and X₂₂₉ is glutamic acid (E). In some embodiments, X₁₅₃ is proline (P), X₁₂₈ is alanine (A), X₃₃₃ is asparagine (N), and X₂₂₉ is glutamic acid (E). In some embodiments, X₁₅₃ is proline (P), X₁₂₈ is alanine (A), and X₃₂₄ is isoleucine (I). In some embodiments, X₁₅₃ is proline (P), X₁₂₈ is alanine (A), X₃₂₄ is isoleucine (I), and X₁₆₂ is glutamic acid (E). In some embodiments, X₁₅₃ is proline (P), X₁₂₈ is alanine (A), X₃₂₄ is isoleucine (I), X₁₆₂ is glutamic acid (E), and X₂₂₉ is glutamic acid (E). In some embodiments, X₁₅₃ is proline (P), X₁₂₈ is alanine (A), X₃₂₄ is isoleucine (I), and X₂₂₉ is glutamic acid (E). In some embodiments, X₁₅₃ is proline (P), X₁₂₈ is alanine (A), and X₁₆₂ is glutamic acid (E). In some embodiments, X₁₅₃ is proline (P), X₁₂₈ is alanine (A), X₁₆₂ is glutamic acid (E), and X₂₂₉ is glutamic acid (E). In some embodiments, X₁₅₃ is proline (P), X₁₂₈ is alanine (A), and X₂₂₉ is glutamic acid (E). In some embodiments, X₁₅₃ is proline (P), and X₃₃₃ is asparagine (N). In some embodiments, X₁₅₃ is proline (P), X₃₃₃ is asparagine (N), and X₃₂₄ is isoleucine (I). In some embodiments, X₁₅₃ is proline (P), X₃₃₃ is asparagine (N), X₃₂₄ is isoleucine (I), and X₁₆₂ is glutamic acid (E). In some embodiments, X₁₅₃ is proline (P), X₃₃₃ is asparagine (N), X₃₂₄ is isoleucine (I), X₁₆₂ is glutamic acid (E), and X₂₂₉ is glutamic acid (E). In some embodiments, X₁₅₃ is proline (P), X₃₃₃ is asparagine (N), X₃₂₄ is isoleucine (I), and X₂₂₉ is glutamic acid (E). In some embodiments, X₁₅₃ is proline (P), X₃₃₃ is asparagine (N), and X₁₆₂ is glutamic acid (E). In some embodiments, X₁₅₃ is proline (P), X₃₃₃ is asparagine (N), X₁₆₂ is glutamic acid (E), and X₂₂₉ is glutamic acid (E). In some embodiments, X₁₅₃ is proline (P), X₃₃₃ is asparagine (N), and X₂₂₉ is glutamic acid (E). In some embodiments, X₁₅₃ is proline (P), and X₃₂₄ is isoleucine (I). In some embodiments, X₁₅₃ is proline (P), X₃₂₄ is isoleucine (I), and X₁₆₂ is glutamic acid (E). In some embodiments, X₁₅₃ is proline (P), X₃₂₄ is isoleucine (I), X₁₆₂ is glutamic acid (E), and X₂₂₉ is glutamic acid (E). In some embodiments, X₁₅₃ is proline (P), X₃₂₄ is isoleucine (I), and X₂₂₉ is glutamic acid (E). In some embodiments, X₁₅₃ is proline (P), and X₁₆₂ is glutamic acid (E). In some embodiments, X₁₅₃ is proline (P), X₁₆₂ is glutamic acid (E), and X₂₂₉ is glutamic acid (E). In some embodiments, X₁₅₃ is proline (P), and X₂₂₉ is glutamic acid (E). In some embodiments, X₁₂₈ is alanine (A). In some embodiments, X₁₂₈ is alanine (A), and X₃₃₃ is asparagine (N). In some embodiments, X₁₂₈ is alanine (A), X₃₃₃ is asparagine (N), and X₃₂₄ is isoleucine (I). In some embodiments, X₁₂₈ is alanine (A), X₃₃₃ is asparagine (N), X₃₂₄ is isoleucine (I), and X₁₆₂ is glutamic acid (E). In some embodiments, X₁₂₈ is alanine (A), X₃₃₃ is asparagine (N), X₃₂₄ is isoleucine (I), X₁₆₂ is glutamic acid (E), and X₂₂₉ is glutamic acid (E). In some embodiments, X₁₂₈ is alanine (A), X₃₃₃ is asparagine (N), X₃₂₄ is isoleucine (I), and X₂₂₉ is glutamic acid (E). In some embodiments, X₁₂₈ is alanine (A), X₃₃₃ is asparagine (N), and X₁₆₂ is glutamic acid (E). In some embodiments, X₁₂₈ is alanine (A), X₃₃₃ is asparagine (N), X₁₆₂ is glutamic acid (E), and X₂₂₉ is glutamic acid (E). In some embodiments, X₁₂₈ is alanine (A), X₃₃₃ is asparagine (N), and X₂₂₉ is glutamic acid (E). In some embodiments, X₁₂₈ is alanine (A), and X₃₂₄ is isoleucine (I). In some embodiments, X₁₂₈ is alanine (A), X₃₂₄ is isoleucine (I), and X₁₆₂ is glutamic acid (E). In some embodiments, X₁₂₈ is alanine (A), X₃₂₄ is isoleucine (I), X₁₆₂ is glutamic acid (E), and X₂₂₉ is glutamic acid (E). In some embodiments, X₁₂₈ is alanine (A), X₃₂₄ is isoleucine (I), and X₂₂₉ is glutamic acid (E). In some embodiments, X₁₂₈ is alanine (A), and X₁₆₂ is glutamic acid (E). In some embodiments, X₁₂₈ is alanine (A), X₁₆₂ is glutamic acid (E), and X₂₂₉ is glutamic acid (E). In some embodiments, X₁₂₈ is alanine (A), and X₂₂₉ is glutamic acid (E). In some embodiments, X₃₃₃ is asparagine (N), and X₃₂₄ is isoleucine (I). In some embodiments, X₃₃₃ is asparagine (N), X₃₂₄ is isoleucine (I), and X₁₆₂ is glutamic acid (E). In some embodiments, X₃₃₃ is asparagine (N), X₃₂₄ is isoleucine (I), X₁₆₂ is glutamic acid (E), and X₂₂₉ is glutamic acid (E). In some embodiments, X₃₃₃ is asparagine (N), X₃₂₄ is isoleucine (I), and X₂₂₉ is glutamic acid (E). In some embodiments, X₃₃₃ is asparagine (N), and X₁₆₂ is glutamic acid (E). In some embodiments, X₃₃₃ is asparagine (N), X₁₆₂ is glutamic acid (E), and X₂₂₉ is glutamic acid (E). In some embodiments, X₃₃₃ is asparagine (N), and X₂₂₉ is glutamic acid (E). In some embodiments, X₃₂₄ is isoleucine (I), and X₁₆₂ is glutamic acid (E). In some embodiments, X₃₂₄ is isoleucine (I), X₁₆₂ is glutamic acid (E), and X₂₂₉ is glutamic acid (E). In some embodiments, X₃₂₄ is isoleucine (I), and X₂₂₉ is glutamic acid (E). In some embodiments, X₁₆₂ is glutamic acid (E), and X₂₂₉ is glutamic acid (E).

[0085] In some embodiments, X₁₂₈ is alanine (A), X₁₅₃ is proline (P), X₁₆₂ is glutamic acid (E), X₂₂₉ is glutamic acid (E), X₃₂₄ is isoleucine (I), and X₃₃₃ is asparagine (N).

[0086] In some embodiments, X₁₂₈ is alanine (A), X₁₅₃ is proline (P), X₁₆₂ is glutamic acid (E), X₁₇₄ is glutamic acid (E), X₁₇₇ is an amino acid sequence RDNRDN (SEQ ID NO: 743), X₂₁₉ is glycine (G), X₂₂₉ is glutamic acid (E), X₂₇₅ is tyrosine (Y), X₃₂₄ is isoleucine (I), and X₃₃₃ is asparagine (N).

[0087] In some embodiments, X₉₃ is aspartic acid (D), X₁₂₂ is serine(S), X₁₂₈ is alanine (A), X₁₅₀ is glutamic acid (E), X₁₅₃ is proline (P), X₁₆₂ is glutamic acid (E), X₁₇₄ is glutamic acid (E), X₁₇₇ is an amino acid sequence RDNRDN (SEQ ID NO: 743), X₁₉₉ is proline (P), X₂₁₉ is glycine (G), X₂₂₉ is glutamic acid (E), X₂₄₁ is aspartic acid (D), X₂₇₅ is tyrosine (Y), X₃₂₄ is isoleucine (I), and X₃₃₃ is asparagine (N).

[0088] In some embodiments, X₉₃ is aspartic acid (D), X₁₂₂ is serine(S), X₁₂₈ is alanine (A), X₁₃₉ is glutamic acid (E), X₁₅₀ is glutamic acid (E), X₁₅₃ is proline (P), X₁₆₂ is glutamic acid (E), X₁₇₄ is glutamic acid (E), X₁₇₇ is an amino acid sequence RDNRDN (SEQ ID NO: 743), X₁₉₆ is serine(S), X₁₉₉ is proline (P), X₂₁₉ is glycine (G), X₂₂₂ is glutamine (Q), X₂₂₉ is glutamic acid (E), X₂₄₁ is aspartic acid (D), X₂₆₂ is lysine (K), X₂₇₅ is tyrosine (Y), X₂₈₀ is threonine (T), X₃₂₄ is isoleucine (I), X₃₃₃ is asparagine (N), X₃₄₃ is lysine (K), and X₃₆₀ is leucine (L).

[0089] In some embodiments, the polypeptide having protease activity comprises an amino acid sequence of any one of SEQ ID NO: 380, 251, 5-243, 247, 280-379, 381-528, 737, 745-823, 828-864, or 885-916. In some embodiments, the polypeptide having protease activity comprises an amino acid sequence of SEQ ID NO: 3. In some embodiments, the polypeptide having protease activity comprises an amino acid sequence of SEQ ID NO: 4. In some embodiments, the polypeptide having protease activity comprises an amino acid sequence of SEQ ID NO: 5. In some embodiments, the polypeptide having protease activity comprises an amino acid sequence of SEQ ID NO: 6. In some embodiments, the polypeptide having protease activity comprises an amino acid sequence of SEQ ID NO: 7. In some embodiments, the polypeptide having protease activity comprises an amino acid sequence of SEQ ID NO: 8. In some embodiments, the polypeptide having protease activity comprises an amino acid sequence of SEQ ID NO: 9. In some embodiments, the polypeptide having protease activity comprises an amino acid sequence of SEQ ID NO: 10. In some embodiments, the polypeptide having protease activity comprises an amino acid sequence of SEQ ID NO: 11. In some embodiments, the polypeptide having protease activity comprises an amino acid sequence of SEQ ID NO: 12. In some embodiments, the polypeptide having protease activity comprises an amino acid sequence of SEQ ID NO: 13. In some embodiments, the polypeptide having protease activity comprises an amino acid sequence of SEQ ID NO: 14. In some embodiments, the polypeptide having protease activity comprises an amino acid sequence of SEQ ID NO: 15. In some embodiments, the polypeptide having protease activity comprises an amino acid sequence of SEQ ID NO: 16. In some embodiments, the polypeptide having protease activity comprises an amino acid sequence of SEQ ID NO: 17. In some embodiments, the polypeptide having protease activity comprises an amino acid sequence of SEQ ID NO: 18. In some embodiments, the polypeptide having protease activity comprises an amino acid sequence of SEQ ID NO: 19. In some embodiments, the polypeptide having protease activity comprises an amino acid sequence of SEQ ID NO: 20. In some embodiments, the polypeptide having protease activity comprises an amino acid sequence of SEQ ID NO: 21. In some embodiments, the polypeptide having protease activity comprises an amino acid sequence of SEQ ID NO: 22. In some embodiments, the polypeptide having protease activity comprises an amino acid sequence of SEQ ID NO: 23. In some embodiments, the polypeptide having protease activity comprises an amino acid sequence of SEQ ID NO: 24. In some embodiments, the polypeptide having protease activity comprises an amino acid sequence of SEQ ID NO: 25. In some embodiments, the polypeptide having protease activity comprises an amino acid sequence of SEQ ID NO: 26. In some embodiments, the polypeptide having protease activity comprises an amino acid sequence of SEQ ID NO: 27. In some embodiments, the polypeptide having protease activity comprises an amino acid sequence of SEQ ID NO: 28. In some embodiments, the polypeptide having protease activity comprises an amino acid sequence of SEQ ID NO: 29. In some embodiments, the polypeptide having protease activity comprises an amino acid sequence of SEQ ID NO: 30. In some embodiments, the polypeptide having protease activity comprises an amino acid sequence of SEQ ID NO: 31. In some embodiments, the polypeptide having protease activity comprises an amino acid sequence of SEQ ID NO: 32. In some embodiments, the polypeptide having protease activity comprises an amino acid sequence of SEQ ID NO: 33. In some embodiments, the polypeptide having protease activity comprises an amino acid sequence of SEQ ID NO: 34. In some embodiments, the polypeptide having protease activity comprises an amino acid sequence of SEQ ID NO: 35. In some embodiments, the polypeptide having protease activity comprises an amino acid sequence of SEQ ID NO: 36. In some embodiments, the polypeptide having protease activity comprises an amino acid sequence of SEQ ID NO: 37. In some embodiments, the polypeptide having protease activity comprises an amino acid sequence of SEQ ID NO: 38. In some embodiments, the polypeptide having protease activity comprises an amino acid sequence of SEQ ID NO: 39. In some embodiments, the polypeptide having protease activity comprises an amino acid sequence of SEQ ID NO: 40. In some embodiments, the polypeptide having protease activity comprises an amino acid sequence of SEQ ID NO: 41. In some embodiments, the polypeptide having protease activity comprises an amino acid sequence of SEQ ID NO: 42. In some embodiments, the polypeptide having protease activity comprises an amino acid sequence of SEQ ID NO: 43. In some embodiments, the polypeptide having protease activity comprises an amino acid sequence of SEQ ID NO: 44. In some embodiments, the polypeptide having protease activity comprises an amino acid sequence of SEQ ID NO: 45. In some embodiments, the polypeptide having protease activity comprises an amino acid sequence of SEQ ID NO: 46. In some embodiments, the polypeptide having protease activity comprises an amino acid sequence of SEQ ID NO: 47. In some embodiments, the polypeptide having protease activity comprises an amino acid sequence of SEQ ID NO: 48. In some embodiments, the polypeptide having protease activity comprises an amino acid sequence of SEQ ID NO: 49. In some embodiments, the polypeptide having protease activity comprises an amino acid sequence of SEQ ID NO: 50. In some embodiments, the polypeptide having protease activity comprises an amino acid sequence of SEQ ID NO: 51. In some embodiments, the polypeptide having protease activity comprises an amino acid sequence of SEQ ID NO: 52. In some embodiments, the polypeptide having protease activity comprises an amino acid sequence of SEQ ID NO: 53. In some embodiments, the polypeptide having protease activity comprises an amino acid sequence of SEQ ID NO: 54. In some embodiments, the polypeptide having protease activity comprises an amino acid sequence of SEQ ID NO: 55. In some embodiments, the polypeptide having protease activity comprises an amino acid sequence of SEQ ID NO: 56. In some embodiments, the polypeptide having protease activity comprises an amino acid sequence of SEQ ID NO: 57. In some embodiments, the polypeptide having protease activity comprises an amino acid sequence of SEQ ID NO: 58. In some embodiments, the polypeptide having protease activity comprises an amino acid sequence of SEQ ID NO: 59. In some embodiments, the polypeptide having protease activity comprises an amino acid sequence of SEQ ID NO: 60. In some embodiments, the polypeptide having protease activity comprises an amino acid sequence of SEQ ID NO: 61. In some embodiments, the polypeptide having protease activity comprises an amino acid sequence of SEQ ID NO: 62. In some embodiments, the polypeptide having protease activity comprises an amino acid sequence of SEQ ID NO: 63. In some embodiments, the polypeptide having protease activity comprises an amino acid sequence of SEQ ID NO: 64. In some embodiments, the polypeptide having protease activity comprises an amino acid sequence of SEQ ID NO: 65. In some embodiments, the polypeptide having protease activity comprises an amino acid sequence of SEQ ID NO: 66. In some embodiments, the polypeptide having protease activity comprises an amino acid sequence of SEQ ID NO: 67. In some embodiments, the polypeptide having protease activity comprises an amino acid sequence of SEQ ID NO: 68. In some embodiments, the polypeptide having protease activity comprises an amino acid sequence of SEQ ID NO: 69. In some embodiments, the polypeptide having protease activity comprises an amino acid sequence of SEQ ID NO: 70. In some embodiments, the polypeptide having protease activity comprises an amino acid sequence of SEQ ID NO: 71. In some embodiments, the polypeptide having protease activity comprises an amino acid sequence of SEQ ID NO: 72. In some embodiments, the polypeptide having protease activity comprises an amino acid sequence of SEQ ID NO: 73. In some embodiments, the polypeptide having protease activity comprises an amino acid sequence of SEQ ID NO: 74. In some embodiments, the polypeptide having protease activity comprises an amino acid sequence of SEQ ID NO: 75. In some embodiments, the polypeptide having protease activity comprises an amino acid sequence of SEQ ID NO: 76. In some embodiments, the polypeptide having protease activity comprises an amino acid sequence of SEQ ID NO: 77. In some embodiments, the polypeptide having protease activity comprises an amino acid sequence of SEQ ID NO: 78. In some embodiments, the polypeptide having protease activity comprises an amino acid sequence of SEQ ID NO: 79. In some embodiments, the polypeptide having protease activity comprises an amino acid sequence of SEQ ID NO: 80. In some embodiments, the polypeptide having protease activity comprises an amino acid sequence of SEQ ID NO: 81. In some embodiments, the polypeptide having protease activity comprises an amino acid sequence of SEQ ID NO: 82. In some embodiments, the polypeptide having protease activity comprises an amino acid sequence of SEQ ID NO: 83. In some embodiments, the polypeptide having protease activity comprises an amino acid sequence of SEQ ID NO: 84. In some embodiments, the polypeptide having protease activity comprises an amino acid sequence of SEQ ID NO: 85. In some embodiments, the polypeptide having protease activity comprises an amino acid sequence of SEQ ID NO: 86. In some embodiments, the polypeptide having protease activity comprises an amino acid sequence of SEQ ID NO: 87. In some embodiments, the polypeptide having protease activity comprises an amino acid sequence of SEQ ID NO: 88. In some embodiments, the polypeptide having protease activity comprises an amino acid sequence of SEQ ID NO: 89. In some embodiments, the polypeptide having protease activity comprises an amino acid sequence of SEQ ID NO: 90. In some embodiments, the polypeptide having protease activity comprises an amino acid sequence of SEQ ID NO: 91. In some embodiments, the polypeptide having protease activity comprises an amino acid sequence of SEQ ID NO: 92. In some embodiments, the polypeptide having protease activity comprises an amino acid sequence of SEQ ID NO: 93. In some embodiments, the polypeptide having protease activity comprises an amino acid sequence of SEQ ID NO: 96. In some embodiments, the polypeptide having protease activity comprises an amino acid sequence of SEQ ID NO: 97. In some embodiments, the polypeptide having protease activity comprises an amino acid sequence of SEQ ID NO: 98. In some embodiments, the polypeptide having protease activity comprises an amino acid sequence of SEQ ID NO: 99. In some embodiments, the polypeptide having protease activity comprises an amino acid sequence of SEQ ID NO: 100. In some embodiments, the polypeptide having protease activity comprises an amino acid sequence of SEQ ID NO: 101. In some embodiments, the polypeptide having protease activity comprises an amino acid sequence of SEQ ID NO: 102. In some embodiments, the polypeptide having protease activity comprises an amino acid sequence of SEQ ID NO: 103. In some embodiments, the polypeptide having protease activity comprises an amino acid sequence of SEQ ID NO: 104. In some embodiments, the polypeptide having protease activity comprises an amino acid sequence of SEQ ID NO: 105. In some embodiments, the polypeptide having protease activity comprises an amino acid sequence of SEQ ID NO: 106. In some embodiments, the polypeptide having protease activity comprises an amino acid sequence of SEQ ID NO: 107. In some embodiments, the polypeptide having protease activity comprises an amino acid sequence of SEQ ID NO: 108. In some embodiments, the polypeptide having protease activity comprises an amino acid sequence of SEQ ID NO: 109. In some embodiments, the polypeptide having protease activity comprises an amino acid sequence of SEQ ID NO: 110. In some embodiments, the polypeptide having protease activity comprises an amino acid sequence of SEQ ID NO: 111. In some embodiments, the polypeptide having protease activity comprises an amino acid sequence of SEQ ID NO: 112. In some embodiments, the polypeptide having protease activity comprises an amino acid sequence of SEQ ID NO: 113. In some embodiments, the polypeptide having protease activity comprises an amino acid sequence of SEQ ID NO: 114. In some embodiments, the polypeptide having protease activity comprises an amino acid sequence of SEQ ID NO: 115. In some embodiments, the polypeptide having protease activity comprises an amino acid sequence of SEQ ID NO: 116. In some embodiments, the polypeptide having protease activity comprises an amino acid sequence of SEQ ID NO: 117. In some embodiments, the polypeptide having protease activity comprises an amino acid sequence of SEQ ID NO: 118. In some embodiments, the polypeptide having protease activity comprises an amino acid sequence of SEQ ID NO: 119. In some embodiments, the polypeptide having protease activity comprises an amino acid sequence of SEQ ID NO: 120. In some embodiments, the polypeptide having protease activity comprises an amino acid sequence of SEQ ID NO: 121. In some embodiments, the polypeptide having protease activity comprises an amino acid sequence of SEQ ID NO: 122. In some embodiments, the polypeptide having protease activity comprises an amino acid sequence of SEQ ID NO: 123. In some embodiments, the polypeptide having protease activity comprises an amino acid sequence of SEQ ID NO: 124. In some embodiments, the polypeptide having protease activity comprises an amino acid sequence of SEQ ID NO: 125. In some embodiments, the polypeptide having protease activity comprises an amino acid sequence of SEQ ID NO: 126. In some embodiments, the polypeptide having protease activity comprises an amino acid sequence of SEQ ID NO: 127. In some embodiments, the polypeptide having protease activity comprises an amino acid sequence of SEQ ID NO: 128. In some embodiments, the polypeptide having protease activity comprises an amino acid sequence of SEQ ID NO: 129. In some embodiments, the polypeptide having protease activity comprises an amino acid sequence of SEQ ID NO: 130. In some embodiments, the polypeptide having protease activity comprises an amino acid sequence of SEQ ID NO: 131. In some embodiments, the polypeptide having protease activity comprises an amino acid sequence of SEQ ID NO: 132. In some embodiments, the polypeptide having protease activity comprises an amino acid sequence of SEQ ID NO: 133. In some embodiments, the polypeptide having protease activity comprises an amino acid sequence of SEQ ID NO: 134. In some embodiments, the polypeptide having protease activity comprises an amino acid sequence of SEQ ID NO: 135. In some embodiments, the polypeptide having protease activity comprises an amino acid sequence of SEQ ID NO: 136. In some embodiments, the polypeptide having protease activity comprises an amino acid sequence of SEQ ID NO: 137. In some embodiments, the polypeptide having protease activity comprises an amino acid sequence of SEQ ID NO: 138. In some embodiments, the polypeptide having protease activity comprises an amino acid sequence of SEQ ID NO: 139. In some embodiments, the polypeptide having protease activity comprises an amino acid sequence of SEQ ID NO: 140. In some embodiments, the polypeptide having protease activity comprises an amino acid sequence of SEQ ID NO: 141. In some embodiments, the polypeptide having protease activity comprises an amino acid sequence of SEQ ID NO: 142. In some embodiments, the polypeptide having protease activity comprises an amino acid sequence of SEQ ID NO: 143. In some embodiments, the polypeptide having protease activity comprises an amino acid sequence of SEQ ID NO: 144. In some embodiments, the polypeptide having protease activity comprises an amino acid sequence of SEQ ID NO: 145. In some embodiments, the polypeptide having protease activity comprises an amino acid sequence of SEQ ID NO: 146. In some embodiments, the polypeptide having protease activity comprises an amino acid sequence of SEQ ID NO: 147. In some embodiments, the polypeptide having protease activity comprises an amino acid sequence of SEQ ID NO: 148. In some embodiments, the polypeptide having protease activity comprises an amino acid sequence of SEQ ID NO: 149. In some embodiments, the polypeptide having protease activity comprises an amino acid sequence of SEQ ID NO: 150. In some embodiments, the polypeptide having protease activity comprises an amino acid sequence of SEQ ID NO: 151. In some embodiments, the polypeptide having protease activity comprises an amino acid sequence of SEQ ID NO: 152. In some embodiments, the polypeptide having protease activity comprises an amino acid sequence of SEQ ID NO: 153. In some embodiments, the polypeptide having protease activity comprises an amino acid sequence of SEQ ID NO: 154. In some embodiments, the polypeptide having protease activity comprises an amino acid sequence of SEQ ID NO: 155. In some embodiments, the polypeptide having protease activity comprises an amino acid sequence of SEQ ID NO: 156. In some embodiments, the polypeptide having protease activity comprises an amino acid sequence of SEQ ID NO: 157. In some embodiments, the polypeptide having protease activity comprises an amino acid sequence of SEQ ID NO: 158. In some embodiments, the polypeptide having protease activity comprises an amino acid sequence of SEQ ID NO: 159. In some embodiments, the polypeptide having protease activity comprises an amino acid sequence of SEQ ID NO: 160. In some embodiments, the polypeptide having protease activity comprises an amino acid sequence of SEQ ID NO: 161. In some embodiments, the polypeptide having protease activity comprises an amino acid sequence of SEQ ID NO: 162. In some embodiments, the polypeptide having protease activity comprises an amino acid sequence of SEQ ID NO: 163. In some embodiments, the polypeptide having protease activity comprises an amino acid sequence of SEQ ID NO: 164. In some embodiments, the polypeptide having protease activity comprises an amino acid sequence of SEQ ID NO: 165. In some embodiments, the polypeptide having protease activity comprises an amino acid sequence of SEQ ID NO: 166. In some embodiments, the polypeptide having protease activity comprises an amino acid sequence of SEQ ID NO: 167. In some embodiments, the polypeptide having protease activity comprises an amino acid sequence of SEQ ID NO: 168. In some embodiments, the polypeptide having protease activity comprises an amino acid sequence of SEQ ID NO: 169. In some embodiments, the polypeptide having protease activity comprises an amino acid sequence of SEQ ID NO: 170. In some embodiments, the polypeptide having protease activity comprises an amino acid sequence of SEQ ID NO: 171. In some embodiments, the polypeptide having protease activity comprises an amino acid sequence of SEQ ID NO: 172. In some embodiments, the polypeptide having protease activity comprises an amino acid sequence of SEQ ID NO: 173. In some embodiments, the polypeptide having protease activity comprises an amino acid sequence of SEQ ID NO: 174. In some embodiments, the polypeptide having protease activity comprises an amino acid sequence of SEQ ID NO: 175. In some embodiments, the polypeptide having protease activity comprises an amino acid sequence of SEQ ID NO: 176. In some embodiments, the polypeptide having protease activity comprises an amino acid sequence of SEQ ID NO: 177. In some embodiments, the polypeptide having protease activity comprises an amino acid sequence of SEQ ID NO: 178. In some embodiments, the polypeptide having protease activity comprises an amino acid sequence of SEQ ID NO: 179. In some embodiments, the polypeptide having protease activity comprises an amino acid sequence of SEQ ID NO: 180. In some embodiments, the polypeptide having protease activity comprises an amino acid sequence of SEQ ID NO: 181. In some embodiments, the polypeptide having protease activity comprises an amino acid sequence of SEQ ID NO: 182. In some embodiments, the polypeptide having protease activity comprises an amino acid sequence of SEQ ID NO: 183. In some embodiments, the polypeptide having protease activity comprises an amino acid sequence of SEQ ID NO: 184. In some embodiments, the polypeptide having protease activity comprises an amino acid sequence of SEQ ID NO: 185. In some embodiments, the polypeptide having protease activity comprises an amino acid sequence of SEQ ID NO: 186. In some embodiments, the polypeptide having protease activity comprises an amino acid sequence of SEQ ID NO: 187. In some embodiments, the polypeptide having protease activity comprises an amino acid sequence of SEQ ID NO: 188. In some embodiments, the polypeptide having protease activity comprises an amino acid sequence of SEQ ID NO: 189. In some embodiments, the polypeptide having protease activity comprises an amino acid sequence of SEQ ID NO: 190. In some embodiments, the polypeptide having protease activity comprises an amino acid sequence of SEQ ID NO: 191. In some embodiments, the polypeptide having protease activity comprises an amino acid sequence of SEQ ID NO: 192. In some embodiments, the polypeptide having protease activity comprises an amino acid sequence of SEQ ID NO: 193. In some embodiments, the polypeptide having protease activity comprises an amino acid sequence of SEQ ID NO: 194. In some embodiments, the polypeptide having protease activity comprises an amino acid sequence of SEQ ID NO: 195. In some embodiments, the polypeptide having protease activity comprises an amino acid sequence of SEQ ID NO: 196. In some embodiments, the polypeptide having protease activity comprises an amino acid sequence of SEQ ID NO: 197. In some embodiments, the polypeptide having protease activity comprises an amino acid sequence of SEQ ID NO: 198. In some embodiments, the polypeptide having protease activity comprises an amino acid sequence of SEQ ID NO: 199. In some embodiments, the polypeptide having protease activity comprises an amino acid sequence of SEQ ID NO: 200. In some embodiments, the polypeptide having protease activity comprises an amino acid sequence of SEQ ID NO: 201. In some embodiments, the polypeptide having protease activity comprises an amino acid sequence of SEQ ID NO: 202. In some embodiments, the polypeptide having protease activity comprises an amino acid sequence of SEQ ID NO: 203. In some embodiments, the polypeptide having protease activity comprises an amino acid sequence of SEQ ID NO: 204. In some embodiments, the polypeptide having protease activity comprises an amino acid sequence of SEQ ID NO: 205. In some embodiments, the polypeptide having protease activity comprises an amino acid sequence of SEQ ID NO: 206. In some embodiments, the polypeptide having protease activity comprises an amino acid sequence of SEQ ID NO: 207. In some embodiments, the polypeptide having protease activity comprises an amino acid sequence of SEQ ID NO: 208. In some embodiments, the polypeptide having protease activity comprises an amino acid sequence of SEQ ID NO: 209. In some embodiments, the polypeptide having protease activity comprises an amino acid sequence of SEQ ID NO: 210. In some embodiments, the polypeptide having protease activity comprises an amino acid sequence of SEQ ID NO: 211. In some embodiments, the polypeptide having protease activity comprises an amino acid sequence of SEQ ID NO: 212. In some embodiments, the polypeptide having protease activity comprises an amino acid sequence of SEQ ID NO: 213. In some embodiments, the polypeptide having protease activity comprises an amino acid sequence of SEQ ID NO: 214. In some embodiments, the polypeptide having protease activity comprises an amino acid sequence of SEQ ID NO: 215. In some embodiments, the polypeptide having protease activity comprises an amino acid sequence of SEQ ID NO: 216. In some embodiments, the polypeptide having protease activity comprises an amino acid sequence of SEQ ID NO: 217. In some embodiments, the polypeptide having protease activity comprises an amino acid sequence of SEQ ID NO: 218. In some embodiments, the polypeptide having protease activity comprises an amino acid sequence of SEQ ID NO: 219. In some embodiments, the polypeptide having protease activity comprises an amino acid sequence of SEQ ID NO: 220. In some embodiments, the polypeptide having protease activity comprises an amino acid sequence of SEQ ID NO: 221. In some embodiments, the polypeptide having protease activity comprises an amino acid sequence of SEQ ID NO: 222. In some embodiments, the polypeptide having protease activity comprises an amino acid sequence of SEQ ID NO: 223. In some embodiments, the polypeptide having protease activity comprises an amino acid sequence of SEQ ID NO: 224. In some embodiments, the polypeptide having protease activity comprises an amino acid sequence of SEQ ID NO: 225. In some embodiments, the polypeptide having protease activity comprises an amino acid sequence of SEQ ID NO: 226. In some embodiments, the polypeptide having protease activity comprises an amino acid sequence of SEQ ID NO: 227. In some embodiments, the polypeptide having protease activity comprises an amino acid sequence of SEQ ID NO: 228. In some embodiments, the polypeptide having protease activity comprises an amino acid sequence of SEQ ID NO: 229. In some embodiments, the polypeptide having protease activity comprises an amino acid sequence of SEQ ID NO: 230. In some embodiments, the polypeptide having protease activity comprises an amino acid sequence of SEQ ID NO: 231. In some embodiments, the polypeptide having protease activity comprises an amino acid sequence of SEQ ID NO: 232. In some embodiments, the polypeptide having protease activity comprises an amino acid sequence of SEQ ID NO: 233. In some embodiments, the polypeptide having protease activity comprises an amino acid sequence of SEQ ID NO: 234. In some embodiments, the polypeptide having protease activity comprises an amino acid sequence of SEQ ID NO: 235. In some embodiments, the polypeptide having protease activity comprises an amino acid sequence of SEQ ID NO: 236. In some embodiments, the polypeptide having protease activity comprises an amino acid sequence of SEQ ID NO: 237. In some embodiments, the polypeptide having protease activity comprises an amino acid sequence of SEQ ID NO: 238. In some embodiments, the polypeptide having protease activity comprises an amino acid sequence of SEQ ID NO: 239. In some embodiments, the polypeptide having protease activity comprises an amino acid sequence of SEQ ID NO: 240. In some embodiments, the polypeptide having protease activity comprises an amino acid sequence of SEQ ID NO: 241. In some embodiments, the polypeptide having protease activity comprises an amino acid sequence of SEQ ID NO: 242. In some embodiments, the polypeptide having protease activity comprises an amino acid sequence of SEQ ID NO: 243. In some embodiments, the polypeptide having protease activity comprises an amino acid sequence of SEQ ID NO: 247. In some embodiments, the polypeptide having protease activity comprises an amino acid sequence of SEQ ID NO: 251. In some embodiments, the polypeptide having protease activity comprises an amino acid sequence of SEQ ID NO: 280. In some embodiments, the polypeptide having protease activity comprises an amino acid sequence of SEQ ID NO: 281. In some embodiments, the polypeptide having protease activity comprises an amino acid sequence of SEQ ID NO: 282. In some embodiments, the polypeptide having protease activity comprises an amino acid sequence of SEQ ID NO: 283. In some embodiments, the polypeptide having protease activity comprises an amino acid sequence of SEQ ID NO: 284. In some embodiments, the polypeptide having protease activity comprises an amino acid sequence of SEQ ID NO: 285. In some embodiments, the polypeptide having protease activity comprises an amino acid sequence of SEQ ID NO: 286. In some embodiments, the polypeptide having protease activity comprises an amino acid sequence of SEQ ID NO: 287. In some embodiments, the polypeptide having protease activity comprises an amino acid sequence of SEQ ID NO: 288. In some embodiments, the polypeptide having protease activity comprises an amino acid sequence of SEQ ID NO: 289. In some embodiments, the polypeptide having protease activity comprises an amino acid sequence of SEQ ID NO: 290. In some embodiments, the polypeptide having protease activity comprises an amino acid sequence of SEQ ID NO: 291. In some embodiments, the polypeptide having protease activity comprises an amino acid sequence of SEQ ID NO: 292. In some embodiments, the polypeptide having protease activity comprises an amino acid sequence of SEQ ID NO: 293. In some embodiments, the polypeptide having protease activity comprises an amino acid sequence of SEQ ID NO: 294. In some embodiments, the polypeptide having protease activity comprises an amino acid sequence of SEQ ID NO: 295. In some embodiments, the polypeptide having protease activity comprises an amino acid sequence of SEQ ID NO: 296. In some embodiments, the polypeptide having protease activity comprises an amino acid sequence of SEQ ID NO: 297. In some embodiments, the polypeptide having protease activity comprises an amino acid sequence of SEQ ID NO: 298. In some embodiments, the polypeptide having protease activity comprises an amino acid sequence of SEQ ID NO: 299. In some embodiments, the polypeptide having protease activity comprises an amino acid sequence of SEQ ID NO: 300. In some embodiments, the polypeptide having protease activity comprises an amino acid sequence of SEQ ID NO: 301. In some embodiments, the polypeptide having protease activity comprises an amino acid sequence of SEQ ID NO: 302. In some embodiments, the polypeptide having protease activity comprises an amino acid sequence of SEQ ID NO: 303. In some embodiments, the polypeptide having protease activity comprises an amino acid sequence of SEQ ID NO: 304. In some embodiments, the polypeptide having protease activity comprises an amino acid sequence of SEQ ID NO: 305. In some embodiments, the polypeptide having protease activity comprises an amino acid sequence of SEQ ID NO: 306. In some embodiments, the polypeptide having protease activity comprises an amino acid sequence of SEQ ID NO: 307. In some embodiments, the polypeptide having protease activity comprises an amino acid sequence of SEQ ID NO: 308. In some embodiments, the polypeptide having protease activity comprises an amino acid sequence of SEQ ID NO: 309. In some embodiments, the polypeptide having protease activity comprises an amino acid sequence of SEQ ID NO: 310. In some embodiments, the polypeptide having protease activity comprises an amino acid sequence of SEQ ID NO: 311. In some embodiments, the polypeptide having protease activity comprises an amino acid sequence of SEQ ID NO: 312. In some embodiments, the polypeptide having protease activity comprises an amino acid sequence of SEQ ID NO: 313. In some embodiments, the polypeptide having protease activity comprises an amino acid sequence of SEQ ID NO: 314. In some embodiments, the polypeptide having protease activity comprises an amino acid sequence of SEQ ID NO: 315. In some embodiments, the polypeptide having protease activity comprises an amino acid sequence of SEQ ID NO: 316. In some embodiments, the polypeptide having protease activity comprises an amino acid sequence of SEQ ID NO: 317. In some embodiments, the polypeptide having protease activity comprises an amino acid sequence of SEQ ID NO: 318. In some embodiments, the polypeptide having protease activity comprises an amino acid sequence of SEQ ID NO: 319. In some embodiments, the polypeptide having protease activity comprises an amino acid sequence of SEQ ID NO: 320. In some embodiments, the polypeptide having protease activity comprises an amino acid sequence of SEQ ID NO: 321. In some embodiments, the polypeptide having protease activity comprises an amino acid sequence of SEQ ID NO: 322. In some embodiments, the polypeptide having protease activity comprises an amino acid sequence of SEQ ID NO: 323. In some embodiments, the polypeptide having protease activity comprises an amino acid sequence of SEQ ID NO: 324. In some embodiments, the polypeptide having protease activity comprises an amino acid sequence of SEQ ID NO: 325. In some embodiments, the polypeptide having protease activity comprises an amino acid sequence of SEQ ID NO: 326. In some embodiments, the polypeptide having protease activity comprises an amino acid sequence of SEQ ID NO: 327. In some embodiments, the polypeptide having protease activity comprises an amino acid sequence of SEQ ID NO: 328. In some embodiments, the polypeptide having protease activity comprises an amino acid sequence of SEQ ID NO: 329. In some embodiments, the polypeptide having protease activity comprises an amino acid sequence of SEQ ID NO: 330. In some embodiments, the polypeptide having protease activity comprises an amino acid sequence of SEQ ID NO: 331. In some embodiments, the polypeptide having protease activity comprises an amino acid sequence of SEQ ID NO: 332. In some embodiments, the polypeptide having protease activity comprises an amino acid sequence of SEQ ID NO: 333. In some embodiments, the polypeptide having protease activity comprises an amino acid sequence of SEQ ID NO: 334. In some embodiments, the polypeptide having protease activity comprises an amino acid sequence of SEQ ID NO: 335. In some embodiments, the polypeptide having protease activity comprises an amino acid sequence of SEQ ID NO: 336. In some embodiments, the polypeptide having protease activity comprises an amino acid sequence of SEQ ID NO: 337. In some embodiments, the polypeptide having protease activity comprises an amino acid sequence of SEQ ID NO: 338. In some embodiments, the polypeptide having protease activity comprises an amino acid sequence of SEQ ID NO: 339. In some embodiments, the polypeptide having protease activity comprises an amino acid sequence of SEQ ID NO: 340. In some embodiments, the polypeptide having protease activity comprises an amino acid sequence of SEQ ID NO: 341. In some embodiments, the polypeptide having protease activity comprises an amino acid sequence of SEQ ID NO: 342. In some embodiments, the polypeptide having protease activity comprises an amino acid sequence of SEQ ID NO: 343. In some embodiments, the polypeptide having protease activity comprises an amino acid sequence of SEQ ID NO: 344. In some embodiments, the polypeptide having protease activity comprises an amino acid sequence of SEQ ID NO: 345. In some embodiments, the polypeptide having protease activity comprises an amino acid sequence of SEQ ID NO: 346. In some embodiments, the polypeptide having protease activity comprises an amino acid sequence of SEQ ID NO: 347. In some embodiments, the polypeptide having protease activity comprises an amino acid sequence of SEQ ID NO: 348. In some embodiments, the polypeptide having protease activity comprises an amino acid sequence of SEQ ID NO: 349. In some embodiments, the polypeptide having protease activity comprises an amino acid sequence of SEQ ID NO: 350. In some embodiments, the polypeptide having protease activity comprises an amino acid sequence of SEQ ID NO: 351. In some embodiments, the polypeptide having protease activity comprises an amino acid sequence of SEQ ID NO: 352. In some embodiments, the polypeptide having protease activity comprises an amino acid sequence of SEQ ID NO: 353. In some embodiments, the polypeptide having protease activity comprises an amino acid sequence of SEQ ID NO: 354. In some embodiments, the polypeptide having protease activity comprises an amino acid sequence of SEQ ID NO: 355. In some embodiments, the polypeptide having protease activity comprises an amino acid sequence of SEQ ID NO: 356. In some embodiments, the polypeptide having protease activity comprises an amino acid sequence of SEQ ID NO: 357. In some embodiments, the polypeptide having protease activity comprises an amino acid sequence of SEQ ID NO: 358. In some embodiments, the polypeptide having protease activity comprises an amino acid sequence of SEQ ID NO: 359. In some embodiments, the polypeptide having protease activity comprises an amino acid sequence of SEQ ID NO: 360. In some embodiments, the polypeptide having protease activity comprises an amino acid sequence of SEQ ID NO: 361. In some embodiments, the polypeptide having protease activity comprises an amino acid sequence of SEQ ID NO: 362. In some embodiments, the polypeptide having protease activity comprises an amino acid sequence of SEQ ID NO: 363. In some embodiments, the polypeptide having protease activity comprises an amino acid sequence of SEQ ID NO: 364. In some embodiments, the polypeptide having protease activity comprises an amino acid sequence of SEQ ID NO: 365. In some embodiments, the polypeptide having protease activity comprises an amino acid sequence of SEQ ID NO: 366. In some embodiments, the polypeptide having protease activity comprises an amino acid sequence of SEQ ID NO: 367. In some embodiments, the polypeptide having protease activity comprises an amino acid sequence of SEQ ID NO: 368. In some embodiments, the polypeptide having protease activity comprises an amino acid sequence of SEQ ID NO: 369. In some embodiments, the polypeptide having protease activity comprises an amino acid sequence of SEQ ID NO: 370. In some embodiments, the polypeptide having protease activity comprises an amino acid sequence of SEQ ID NO: 371. In some embodiments, the polypeptide having protease activity comprises an amino acid sequence of SEQ ID NO: 372. In some embodiments, the polypeptide having protease activity comprises an amino acid sequence of SEQ ID NO: 373. In some embodiments, the polypeptide having protease activity comprises an amino acid sequence of SEQ ID NO: 374. In some embodiments, the polypeptide having protease activity comprises an amino acid sequence of SEQ ID NO: 375. In some embodiments, the polypeptide having protease activity comprises an amino acid sequence of SEQ ID NO: 376. In some embodiments, the polypeptide having protease activity comprises an amino acid sequence of SEQ ID NO: 377. In some embodiments, the polypeptide having protease activity comprises an amino acid sequence of SEQ ID NO: 378. In some embodiments, the polypeptide having protease activity comprises an amino acid sequence of SEQ ID NO: 379. In some embodiments, the polypeptide having protease activity comprises an amino acid sequence of SEQ ID NO: 380. In some embodiments, the polypeptide having protease activity comprises an amino acid sequence of SEQ ID NO: 381. In some embodiments, the polypeptide having protease activity comprises an amino acid sequence of SEQ ID NO: 382. In some embodiments, the polypeptide having protease activity comprises an amino acid sequence of SEQ ID NO: 383. In some embodiments, the polypeptide having protease activity comprises an amino acid sequence of SEQ ID NO: 384. In some embodiments, the polypeptide having protease activity comprises an amino acid sequence of SEQ ID NO: 385. In some embodiments, the polypeptide having protease activity comprises an amino acid sequence of SEQ ID NO: 386. In some embodiments, the polypeptide having protease activity comprises an amino acid sequence of SEQ ID NO: 387. In some embodiments, the polypeptide having protease activity comprises an amino acid sequence of SEQ ID NO: 388. In some embodiments, the polypeptide having protease activity comprises an amino acid sequence of SEQ ID NO: 389. In some embodiments, the polypeptide having protease activity comprises an amino acid sequence of SEQ ID NO: 390. In some embodiments, the polypeptide having protease activity comprises an amino acid sequence of SEQ ID NO: 391. In some embodiments, the polypeptide having protease activity comprises an amino acid sequence of SEQ ID NO: 392. In some embodiments, the polypeptide having protease activity comprises an amino acid sequence of SEQ ID NO: 393. In some embodiments, the polypeptide having protease activity comprises an amino acid sequence of SEQ ID NO: 394. In some embodiments, the polypeptide having protease activity comprises an amino acid sequence of SEQ ID NO: 395. In some embodiments, the polypeptide having protease activity comprises an amino acid sequence of SEQ ID NO: 396. In some embodiments, the polypeptide having protease activity comprises an amino acid sequence of SEQ ID NO: 397. In some embodiments, the polypeptide having protease activity comprises an amino acid sequence of SEQ ID NO: 398. In some embodiments, the polypeptide having protease activity comprises an amino acid sequence of SEQ ID NO: 399. In some embodiments, the polypeptide having protease activity comprises an amino acid sequence of SEQ ID NO: 400. In some embodiments, the polypeptide having protease activity comprises an amino acid sequence of SEQ ID NO: 401. In some embodiments, the polypeptide having protease activity comprises an amino acid sequence of SEQ ID NO: 402. In some embodiments, the polypeptide having protease activity comprises an amino acid sequence of SEQ ID NO: 403. In some embodiments, the polypeptide having protease activity comprises an amino acid sequence of SEQ ID NO: 404. In some embodiments, the polypeptide having protease activity comprises an amino acid sequence of SEQ ID NO: 405. In some embodiments, the polypeptide having protease activity comprises an amino acid sequence of SEQ ID NO: 406. In some embodiments, the polypeptide having protease activity comprises an amino acid sequence of SEQ ID NO: 407. In some embodiments, the polypeptide having protease activity comprises an amino acid sequence of SEQ ID NO: 408. In some embodiments, the polypeptide having protease activity comprises an amino acid sequence of SEQ ID NO: 409. In some embodiments, the polypeptide having protease activity comprises an amino acid sequence of SEQ ID NO: 410. In some embodiments, the polypeptide having protease activity comprises an amino acid sequence of SEQ ID NO: 411. In some embodiments, the polypeptide having protease activity comprises an amino acid sequence of SEQ ID NO: 412. In some embodiments, the polypeptide having protease activity comprises an amino acid sequence of SEQ ID NO: 413. In some embodiments, the polypeptide having protease activity comprises an amino acid sequence of SEQ ID NO: 414. In some embodiments, the polypeptide having protease activity comprises an amino acid sequence of SEQ ID NO: 415. In some embodiments, the polypeptide having protease activity comprises an amino acid sequence of SEQ ID NO: 416. In some embodiments, the polypeptide having protease activity comprises an amino acid sequence of SEQ ID NO: 417. In some embodiments, the polypeptide having protease activity comprises an amino acid sequence of SEQ ID NO: 418. In some embodiments, the polypeptide having protease activity comprises an amino acid sequence of SEQ ID NO: 419. In some embodiments, the polypeptide having protease activity comprises an amino acid sequence of SEQ ID NO: 420. In some embodiments, the polypeptide having protease activity comprises an amino acid sequence of SEQ ID NO: 421. In some embodiments, the polypeptide having protease activity comprises an amino acid sequence of SEQ ID NO: 422. In some embodiments, the polypeptide having protease activity comprises an amino acid sequence of SEQ ID NO: 423. In some embodiments, the polypeptide having protease activity comprises an amino acid sequence of SEQ ID NO: 424. In some embodiments, the polypeptide having protease activity comprises an amino acid sequence of SEQ ID NO: 425. In some embodiments, the polypeptide having protease activity comprises an amino acid sequence of SEQ ID NO: 426. In some embodiments, the polypeptide having protease activity comprises an amino acid sequence of SEQ ID NO: 427. In some embodiments, the polypeptide having protease activity comprises an amino acid sequence of SEQ ID NO: 428. In some embodiments, the polypeptide having protease activity comprises an amino acid sequence of SEQ ID NO: 429. In some embodiments, the polypeptide having protease activity comprises an amino acid sequence of SEQ ID NO: 430. In some embodiments, the polypeptide having protease activity comprises an amino acid sequence of SEQ ID NO: 431. In some embodiments, the polypeptide having protease activity comprises an amino acid sequence of SEQ ID NO: 432. In some embodiments, the polypeptide having protease activity comprises an amino acid sequence of SEQ ID NO: 433. In some embodiments, the polypeptide having protease activity comprises an amino acid sequence of SEQ ID NO: 434. In some embodiments, the polypeptide having protease activity comprises an amino acid sequence of SEQ ID NO: 435. In some embodiments, the polypeptide having protease activity comprises an amino acid sequence of SEQ ID NO: 436. In some embodiments, the polypeptide having protease activity comprises an amino acid sequence of SEQ ID NO: 437. In some embodiments, the polypeptide having protease activity comprises an amino acid sequence of SEQ ID NO: 438. In some embodiments, the polypeptide having protease activity comprises an amino acid sequence of SEQ ID NO: 439. In some embodiments, the polypeptide having protease activity comprises an amino acid sequence of SEQ ID NO: 440. In some embodiments, the polypeptide having protease activity comprises an amino acid sequence of SEQ ID NO: 441. In some embodiments, the polypeptide having protease activity comprises an amino acid sequence of SEQ ID NO: 442. In some embodiments, the polypeptide having protease activity comprises an amino acid sequence of SEQ ID NO: 443. In some embodiments, the polypeptide having protease activity comprises an amino acid sequence of SEQ ID NO: 444. In some embodiments, the polypeptide having protease activity comprises an amino acid sequence of SEQ ID NO: 445. In some embodiments, the polypeptide having protease activity comprises an amino acid sequence of SEQ ID NO: 446. In some embodiments, the polypeptide having protease activity comprises an amino acid sequence of SEQ ID NO: 447. In some embodiments, the polypeptide having protease activity comprises an amino acid sequence of SEQ ID NO: 448. In some embodiments, the polypeptide having protease activity comprises an amino acid sequence of SEQ ID NO: 449. In some embodiments, the polypeptide having protease activity comprises an amino acid sequence of SEQ ID NO: 450. In some embodiments, the polypeptide having protease activity comprises an amino acid sequence of SEQ ID NO: 451. In some embodiments, the polypeptide having protease activity comprises an amino acid sequence of SEQ ID NO: 452. In some embodiments, the polypeptide having protease activity comprises an amino acid sequence of SEQ ID NO: 453. In some embodiments, the polypeptide having protease activity comprises an amino acid sequence of SEQ ID NO: 454. In some embodiments, the polypeptide having protease activity comprises an amino acid sequence of SEQ ID NO: 455. In some embodiments, the polypeptide having protease activity comprises an amino acid sequence of SEQ ID NO: 456. In some embodiments, the polypeptide having protease activity comprises an amino acid sequence of SEQ ID NO: 457. In some embodiments, the polypeptide having protease activity comprises an amino acid sequence of SEQ ID NO: 458. In some embodiments, the polypeptide having protease activity comprises an amino acid sequence of SEQ ID NO: 459. In some embodiments, the polypeptide having protease activity comprises an amino acid sequence of SEQ ID NO: 460. In some embodiments, the polypeptide having protease activity comprises an amino acid sequence of SEQ ID NO: 461. In some embodiments, the polypeptide having protease activity comprises an amino acid sequence of SEQ ID NO: 462. In some embodiments, the polypeptide having protease activity comprises an amino acid sequence of SEQ ID NO: 463. In some embodiments, the polypeptide having protease activity comprises an amino acid sequence of SEQ ID NO: 464. In some embodiments, the polypeptide having protease activity comprises an amino acid sequence of SEQ ID NO: 465. In some embodiments, the polypeptide having protease activity comprises an amino acid sequence of SEQ ID NO: 466. In some embodiments, the polypeptide having protease activity comprises an amino acid sequence of SEQ ID NO: 467. In some embodiments, the polypeptide having protease activity comprises an amino acid sequence of SEQ ID NO: 468. In some embodiments, the polypeptide having protease activity comprises an amino acid sequence of SEQ ID NO: 469. In some embodiments, the polypeptide having protease activity comprises an amino acid sequence of SEQ ID NO: 470. In some embodiments, the polypeptide having protease activity comprises an amino acid sequence of SEQ ID NO: 471. In some embodiments, the polypeptide having protease activity comprises an amino acid sequence of SEQ ID NO: 472. In some embodiments, the polypeptide having protease activity comprises an amino acid sequence of SEQ ID NO: 473. In some embodiments, the polypeptide having protease activity comprises an amino acid sequence of SEQ ID NO: 474. In some embodiments, the polypeptide having protease activity comprises an amino acid sequence of SEQ ID NO: 475. In some embodiments, the polypeptide having protease activity comprises an amino acid sequence of SEQ ID NO: 476. In some embodiments, the polypeptide having protease activity comprises an amino acid sequence of SEQ ID NO: 477. In some embodiments, the polypeptide having protease activity comprises an amino acid sequence of SEQ ID NO: 478. In some embodiments, the polypeptide having protease activity comprises an amino acid sequence of SEQ ID NO: 479. In some embodiments, the polypeptide having protease activity comprises an amino acid sequence of SEQ ID NO: 480. In some embodiments, the polypeptide having protease activity comprises an amino acid sequence of SEQ ID NO: 481. In some embodiments, the polypeptide having protease activity comprises an amino acid sequence of SEQ ID NO: 482. In some embodiments, the polypeptide having protease activity comprises an amino acid sequence of SEQ ID NO: 483. In some embodiments, the polypeptide having protease activity comprises an amino acid sequence of SEQ ID NO: 484. In some embodiments, the polypeptide having protease activity comprises an amino acid sequence of SEQ ID NO: 485. In some embodiments, the polypeptide having protease activity comprises an amino acid sequence of SEQ ID NO: 486. In some embodiments, the polypeptide having protease activity comprises an amino acid sequence of SEQ ID NO: 487. In some embodiments, the polypeptide having protease activity comprises an amino acid sequence of SEQ ID NO: 488. In some embodiments, the polypeptide having protease activity comprises an amino acid sequence of SEQ ID NO: 489. In some embodiments, the polypeptide having protease activity comprises an amino acid sequence of SEQ ID NO: 490. In some embodiments, the polypeptide having protease activity comprises an amino acid sequence of SEQ ID NO: 491. In some embodiments, the polypeptide having protease activity comprises an amino acid sequence of SEQ ID NO: 492. In some embodiments, the polypeptide having protease activity comprises an amino acid sequence of SEQ ID NO: 493. In some embodiments, the polypeptide having protease activity comprises an amino acid sequence of SEQ ID NO: 494. In some embodiments, the polypeptide having protease activity comprises an amino acid sequence of SEQ ID NO: 495. In some embodiments, the polypeptide having protease activity comprises an amino acid sequence of SEQ ID NO: 496. In some embodiments, the polypeptide having protease activity comprises an amino acid sequence of SEQ ID NO: 497. In some embodiments, the polypeptide having protease activity comprises an amino acid sequence of SEQ ID NO: 498. In some embodiments, the polypeptide having protease activity comprises an amino acid sequence of SEQ ID NO: 499. In some embodiments, the polypeptide having protease activity comprises an amino acid sequence of SEQ ID NO: 500. In some embodiments, the polypeptide having protease activity comprises an amino acid sequence of SEQ ID NO: 501. In some embodiments, the polypeptide having protease activity comprises an amino acid sequence of SEQ ID NO: 502. In some embodiments, the polypeptide having protease activity comprises an amino acid sequence of SEQ ID NO: 503. In some embodiments, the polypeptide having protease activity comprises an amino acid sequence of SEQ ID NO: 504. In some embodiments, the polypeptide having protease activity comprises an amino acid sequence of SEQ ID NO: 505. In some embodiments, the polypeptide having protease activity comprises an amino acid sequence of SEQ ID NO: 506. In some embodiments, the polypeptide having protease activity comprises an amino acid sequence of SEQ ID NO: 507. In some embodiments, the polypeptide having protease activity comprises an amino acid sequence of SEQ ID NO: 508. In some embodiments, the polypeptide having protease activity comprises an amino acid sequence of SEQ ID NO: 509. In some embodiments, the polypeptide having protease activity comprises an amino acid sequence of SEQ ID NO: 510. In some embodiments, the polypeptide having protease activity comprises an amino acid sequence of SEQ ID NO: 511. In some embodiments, the polypeptide having protease activity comprises an amino acid sequence of SEQ ID NO: 512. In some embodiments, the polypeptide having protease activity comprises an amino acid sequence of SEQ ID NO: 513. In some embodiments, the polypeptide having protease activity comprises an amino acid sequence of SEQ ID NO: 514. In some embodiments, the polypeptide having protease activity comprises an amino acid sequence of SEQ ID NO: 515. In some embodiments, the polypeptide having protease activity comprises an amino acid sequence of SEQ ID NO: 516. In some embodiments, the polypeptide having protease activity comprises an amino acid sequence of SEQ ID NO: 517. In some embodiments, the polypeptide having protease activity comprises an amino acid sequence of SEQ ID NO: 518. In some embodiments, the polypeptide having protease activity comprises an amino acid sequence of SEQ ID NO: 519. In some embodiments, the polypeptide having protease activity comprises an amino acid sequence of SEQ ID NO: 520. In some embodiments, the polypeptide having protease activity comprises an amino acid sequence of SEQ ID NO: 521. In some embodiments, the polypeptide having protease activity comprises an amino acid sequence of SEQ ID NO: 522. In some embodiments, the polypeptide having protease activity comprises an amino acid sequence of SEQ ID NO: 523. In some embodiments, the polypeptide having protease activity comprises an amino acid sequence of SEQ ID NO: 524. In some embodiments, the polypeptide having protease activity comprises an amino acid sequence of SEQ ID NO: 525. In some embodiments, the polypeptide having protease activity comprises an amino acid sequence of SEQ ID NO: 526. In some embodiments, the polypeptide having protease activity comprises an amino acid sequence of SEQ ID NO: 527. In some embodiments, the polypeptide having protease activity comprises an amino acid sequence of SEQ ID NO: 528. In some embodiments, the polypeptide having protease activity comprises an amino acid sequence of SEQ ID NO: 737. In some embodiments, the polypeptide having protease activity comprises an amino acid sequence of SEQ ID NO: 745. In some embodiments, the polypeptide having protease activity comprises an amino acid sequence of SEQ ID NO: 746. In some embodiments, the polypeptide having protease activity comprises an amino acid sequence of SEQ ID NO: 747. In some embodiments, the polypeptide having protease activity comprises an amino acid sequence of SEQ ID NO: 748. In some embodiments, the polypeptide having protease activity comprises an amino acid sequence of SEQ ID NO: 749. In some embodiments, the polypeptide having protease activity comprises an amino acid sequence of SEQ ID NO: 750. In some embodiments, the polypeptide having protease activity comprises an amino acid sequence of SEQ ID NO: 751. In some embodiments, the polypeptide having protease activity comprises an amino acid sequence of SEQ ID NO: 752. In some embodiments, the polypeptide having protease activity comprises an amino acid sequence of SEQ ID NO: 753. In some embodiments, the polypeptide having protease activity comprises an amino acid sequence of SEQ ID NO: 754. In some embodiments, the polypeptide having protease activity comprises an amino acid sequence of SEQ ID NO: 755. In some embodiments, the polypeptide having protease activity comprises an amino acid sequence of SEQ ID NO: 756. In some embodiments, the polypeptide having protease activity comprises an amino acid sequence of SEQ ID NO: 757. In some embodiments, the polypeptide having protease activity comprises an amino acid sequence of SEQ ID NO: 758. In some embodiments, the polypeptide having protease activity comprises an amino acid sequence of SEQ ID NO: 759. In some embodiments, the polypeptide having protease activity comprises an amino acid sequence of SEQ ID NO: 760. In some embodiments, the polypeptide having protease activity comprises an amino acid sequence of SEQ ID NO: 761. In some embodiments, the polypeptide having protease activity comprises an amino acid sequence of SEQ ID NO: 762. In some embodiments, the polypeptide having protease activity comprises an amino acid sequence of SEQ ID NO: 763. In some embodiments, the polypeptide having protease activity comprises an amino acid sequence of SEQ ID NO: 764. In some embodiments, the polypeptide having protease activity comprises an amino acid sequence of SEQ ID NO: 765. In some embodiments, the polypeptide having protease activity comprises an amino acid sequence of SEQ ID NO: 766. In some embodiments, the polypeptide having protease activity comprises an amino acid sequence of SEQ ID NO: 767. In some embodiments, the polypeptide having protease activity comprises an amino acid sequence of SEQ ID NO: 768. In some embodiments, the polypeptide having protease activity comprises an amino acid sequence of SEQ ID NO: 769. In some embodiments, the polypeptide having protease activity comprises an amino acid sequence of SEQ ID NO: 770. In some embodiments, the polypeptide having protease activity comprises an amino acid sequence of SEQ ID NO: 771. In some embodiments, the polypeptide having protease activity comprises an amino acid sequence of SEQ ID NO: 772. In some embodiments, the polypeptide having protease activity comprises an amino acid sequence of SEQ ID NO: 773. In some embodiments, the polypeptide having protease activity comprises an amino acid sequence of SEQ ID NO: 774. In some embodiments, the polypeptide having protease activity comprises an amino acid sequence of SEQ ID NO: 775. In some embodiments, the polypeptide having protease activity comprises an amino acid sequence of SEQ ID NO: 776. In some embodiments, the polypeptide having protease activity comprises an amino acid sequence of SEQ ID NO: 777. In some embodiments, the polypeptide having protease activity comprises an amino acid sequence of SEQ ID NO: 778. In some embodiments, the polypeptide having protease activity comprises an amino acid sequence of SEQ ID NO: 779. In some embodiments, the polypeptide having protease activity comprises an amino acid sequence of SEQ ID NO: 780. In some embodiments, the polypeptide having protease activity comprises an amino acid sequence of SEQ ID NO: 781. In some embodiments, the polypeptide having protease activity comprises an amino acid sequence of SEQ ID NO: 782. In some embodiments, the polypeptide having protease activity comprises an amino acid sequence of SEQ ID NO: 783. In some embodiments, the polypeptide having protease activity comprises an amino acid sequence of SEQ ID NO: 784. In some embodiments, the polypeptide having protease activity comprises an amino acid sequence of SEQ ID NO: 785. In some embodiments, the polypeptide having protease activity comprises an amino acid sequence of SEQ ID NO: 786. In some embodiments, the polypeptide having protease activity comprises an amino acid sequence of SEQ ID NO: 787. In some embodiments, the polypeptide having protease activity comprises an amino acid sequence of SEQ ID NO: 788. In some embodiments, the polypeptide having protease activity comprises an amino acid sequence of SEQ ID NO: 789. In some embodiments, the polypeptide having protease activity comprises an amino acid sequence of SEQ ID NO: 790. In some embodiments, the polypeptide having protease activity comprises an amino acid sequence of SEQ ID NO: 791. In some embodiments, the polypeptide having protease activity comprises an amino acid sequence of SEQ ID NO: 792. In some embodiments, the polypeptide having protease activity comprises an amino acid sequence of SEQ ID NO: 793. In some embodiments, the polypeptide having protease activity comprises an amino acid sequence of SEQ ID NO: 794. In some embodiments, the polypeptide having protease activity comprises an amino acid sequence of SEQ ID NO: 795. In some embodiments, the polypeptide having protease activity comprises an amino acid sequence of SEQ ID NO: 796. In some embodiments, the polypeptide having protease activity comprises an amino acid sequence of SEQ ID NO: 797. In some embodiments, the polypeptide having protease activity comprises an amino acid sequence of SEQ ID NO: 798. In some embodiments, the polypeptide having protease activity comprises an amino acid sequence of SEQ ID NO: 799. In some embodiments, the polypeptide having protease activity comprises an amino acid sequence of SEQ ID NO: 800. In some embodiments, the polypeptide having protease activity comprises an amino acid sequence of SEQ ID NO: 801. In some embodiments, the polypeptide having protease activity comprises an amino acid sequence of SEQ ID NO: 802. In some embodiments, the polypeptide having protease activity comprises an amino acid sequence of SEQ ID NO: 803. In some embodiments, the polypeptide having protease activity comprises an amino acid sequence of SEQ ID NO: 804. In some embodiments, the polypeptide having protease activity comprises an amino acid sequence of SEQ ID NO: 805. In some embodiments, the polypeptide having protease activity comprises an amino acid sequence of SEQ ID NO: 806. In some embodiments, the polypeptide having protease activity comprises an amino acid sequence of SEQ ID NO: 807. In some embodiments, the polypeptide having protease activity comprises an amino acid sequence of SEQ ID NO: 808. In some embodiments, the polypeptide having protease activity comprises an amino acid sequence of SEQ ID NO: 809. In some embodiments, the polypeptide having protease activity comprises an amino acid sequence of SEQ ID NO: 810. In some embodiments, the polypeptide having protease activity comprises an amino acid sequence of SEQ ID NO: 811. In some embodiments, the polypeptide having protease activity comprises an amino acid sequence of SEQ ID NO: 812. In some embodiments, the polypeptide having protease activity comprises an amino acid sequence of SEQ ID NO: 813. In some embodiments, the polypeptide having protease activity comprises an amino acid sequence of SEQ ID NO: 814. In some embodiments, the polypeptide having protease activity comprises an amino acid sequence of SEQ ID NO: 815. In some embodiments, the polypeptide having protease activity comprises an amino acid sequence of SEQ ID NO: 816. In some embodiments, the polypeptide having protease activity comprises an amino acid sequence of SEQ ID NO: 817. In some embodiments, the polypeptide having protease activity comprises an amino acid sequence of SEQ ID NO: 818. In some embodiments, the polypeptide having protease activity comprises an amino acid sequence of SEQ ID NO: 819. In some embodiments, the polypeptide having protease activity comprises an amino acid sequence of SEQ ID NO: 820. In some embodiments, the polypeptide having protease activity comprises an amino acid sequence of SEQ ID NO: 821. In some embodiments, the polypeptide having protease activity comprises an amino acid sequence of SEQ ID NO: 822. In some embodiments, the polypeptide having protease activity comprises an amino acid sequence of SEQ ID NO: 823. In some embodiments, the polypeptide having protease activity comprises an amino acid sequence of SEQ ID NO: 828. In some embodiments, the polypeptide having protease activity comprises an amino acid sequence of SEQ ID NO: 829. In some embodiments, the polypeptide having protease activity comprises an amino acid sequence of SEQ ID NO: 830. In some embodiments, the polypeptide having protease activity comprises an amino acid sequence of SEQ ID NO: 831. In some embodiments, the polypeptide having protease activity comprises an amino acid sequence of SEQ ID NO: 832. In some embodiments, the polypeptide having protease activity comprises an amino acid sequence of SEQ ID NO: 833. In some embodiments, the polypeptide having protease activity comprises an amino acid sequence of SEQ ID NO: 834. In some embodiments, the polypeptide having protease activity comprises an amino acid sequence of SEQ ID NO: 835. In some embodiments, the polypeptide having protease activity comprises an amino acid sequence of SEQ ID NO: 836. In some embodiments, the polypeptide having protease activity comprises an amino acid sequence of SEQ ID NO: 837. In some embodiments, the polypeptide having protease activity comprises an amino acid sequence of SEQ ID NO: 838. In some embodiments, the polypeptide having protease activity comprises an amino acid sequence of SEQ ID NO: 839. In some embodiments, the polypeptide having protease activity comprises an amino acid sequence of SEQ ID NO: 840. In some embodiments, the polypeptide having protease activity comprises an amino acid sequence of SEQ ID NO: 841. In some embodiments, the polypeptide having protease activity comprises an amino acid sequence of SEQ ID NO: 842. In some embodiments, the polypeptide having protease activity comprises an amino acid sequence of SEQ ID NO: 843. In some embodiments, the polypeptide having protease activity comprises an amino acid sequence of SEQ ID NO: 844. In some embodiments, the polypeptide having protease activity comprises an amino acid sequence of SEQ ID NO: 845. In some embodiments, the polypeptide having protease activity comprises an amino acid sequence of SEQ ID NO: 846. In some embodiments, the polypeptide having protease activity comprises an amino acid sequence of SEQ ID NO: 847. In some embodiments, the polypeptide having protease activity comprises an amino acid sequence of SEQ ID NO: 848. In some embodiments, the polypeptide having protease activity comprises an amino acid sequence of SEQ ID NO: 849. In some embodiments, the polypeptide having protease activity comprises an amino acid sequence of SEQ ID NO: 850. In some embodiments, the polypeptide having protease activity comprises an amino acid sequence of SEQ ID NO: 851. In some embodiments, the polypeptide having protease activity comprises an amino acid sequence of SEQ ID NO: 852. In some embodiments, the polypeptide having protease activity comprises an amino acid sequence of SEQ ID NO: 853. In some embodiments, the polypeptide having protease activity comprises an amino acid sequence of SEQ ID NO: 854. In some embodiments, the polypeptide having protease activity comprises an amino acid sequence of SEQ ID NO: 855. In some embodiments, the polypeptide having protease activity comprises an amino acid sequence of SEQ ID NO: 856. In some embodiments, the polypeptide having protease activity comprises an amino acid sequence of SEQ ID NO: 857. In some embodiments, the polypeptide having protease activity comprises an amino acid sequence of SEQ ID NO: 858. In some embodiments, the polypeptide having protease activity comprises an amino acid sequence of SEQ ID NO: 859. In some embodiments, the polypeptide having protease activity comprises an amino acid sequence of SEQ ID NO: 860. In some embodiments, the polypeptide having protease activity comprises an amino acid sequence of SEQ ID NO: 861. In some embodiments, the polypeptide having protease activity comprises an amino acid sequence of SEQ ID NO: 862. In some embodiments, the polypeptide having protease activity comprises an amino acid sequence of SEQ ID NO: 863. In some embodiments, the polypeptide having protease activity comprises an amino acid sequence of SEQ ID NO: 864. In some embodiments, the polypeptide having protease activity comprises an amino acid sequence of SEQ ID NO: 885. In some embodiments, the polypeptide having protease activity comprises an amino acid sequence of SEQ ID NO: 886. In some embodiments, the polypeptide having protease activity comprises an amino acid sequence of SEQ ID NO: 887. In some embodiments, the polypeptide having protease activity comprises an amino acid sequence of SEQ ID NO: 888. In some embodiments, the polypeptide having protease activity comprises an amino acid sequence of SEQ ID NO: 889. In some embodiments, the polypeptide having protease activity comprises an amino acid sequence of SEQ ID NO: 890. In some embodiments, the polypeptide having protease activity comprises an amino acid sequence of SEQ ID NO: 891. In some embodiments, the polypeptide having protease activity comprises an amino acid sequence of SEQ ID NO: 892. In some embodiments, the polypeptide having protease activity comprises an amino acid sequence of SEQ ID NO: 893. In some embodiments, the polypeptide having protease activity comprises an amino acid sequence of SEQ ID NO: 894. In some embodiments, the polypeptide having protease activity comprises an amino acid sequence of SEQ ID NO: 895. In some embodiments, the polypeptide having protease activity comprises an amino acid sequence of SEQ ID NO: 896. In some embodiments, the polypeptide having protease activity comprises an amino acid sequence of SEQ ID NO: 897. In some embodiments, the polypeptide having protease activity comprises an amino acid sequence of SEQ ID NO: 898. In some embodiments, the polypeptide having protease activity comprises an amino acid sequence of SEQ ID NO: 899. In some embodiments, the polypeptide having protease activity comprises an amino acid sequence of SEQ ID NO: 900. In some embodiments, the polypeptide having protease activity comprises an amino acid sequence of SEQ ID NO: 901. In some embodiments, the polypeptide having protease activity comprises an amino acid sequence of SEQ ID NO: 902. In some embodiments, the polypeptide having protease activity comprises an amino acid sequence of SEQ ID NO: 903. In some embodiments, the polypeptide having protease activity comprises an amino acid sequence of SEQ ID NO: 904. In some embodiments, the polypeptide having protease activity comprises an amino acid sequence of SEQ ID NO: 905. In some embodiments, the polypeptide having protease activity comprises an amino acid sequence of SEQ ID NO: 906. In some embodiments, the polypeptide having protease activity comprises an amino acid sequence of SEQ ID NO: 907. In some embodiments, the polypeptide having protease activity comprises an amino acid sequence of SEQ ID NO: 908. In some embodiments, the polypeptide having protease activity comprises an amino acid sequence of SEQ ID NO: 909. In some embodiments, the polypeptide having protease activity comprises an amino acid sequence of SEQ ID NO: 910. In some embodiments, the polypeptide having protease activity comprises an amino acid sequence of SEQ ID NO: 911. In some embodiments, the polypeptide having protease activity comprises an amino acid sequence of SEQ ID NO: 912. In some embodiments, the polypeptide having protease activity comprises an amino acid sequence of SEQ ID NO: 913. In some embodiments, the polypeptide having protease activity comprises an amino acid sequence of SEQ ID NO: 914. In some embodiments, the polypeptide having protease activity comprises an amino acid sequence of SEQ ID NO: 915. In some embodiments, the polypeptide having protease activity comprises an amino acid sequence of SEQ ID NO: 916.

### Dimer Molecules

[0090] In some embodiments, two (or more) polypeptides associate, either covalently or non-covalently, e.g., to form a hetero or homo-dimeric therapeutic compound. In some embodiments, the polypeptide comprises a linker. In some embodiments, the polypeptide comprises an Fc domain. In some embodiments, the polypeptide comprises a linker and an Fc domain. In some embodiments, the linker may comprise an Fc domain. In some embodiments, two Fc domains may associate with one another. In some embodiments of a therapeutic compound comprising two linker regions, the linker regions can self-associate, e.g., as two identical Fc domains. In some embodiments of a therapeutic compound comprising two linker regions, the linker regions are not capable of, or not capable of substantial, self-association, e.g., the two Fc domains can be members of a knob and hole pair.

[0091] In some embodiments, an Fc domain comprises an amino acid sequence having at least 51%, at least 52%, at least 53%, at least 54%, at least 55%, at least 56%, at least 57%, at least 58%, at least 59%, at least 60%, at least 61%, at least 62%, at least 63%, at least 64%, at least 65%, at least 66%, at least 67%, at least 68%, at least 69%, at least 70%, at least 71%, at least 72%, at least 73%, at least 74%, at least 75%, at least 76%, at least 77%, at least 78%, at least 79%, at least 80%, at least 81%, at least 82%, at least 83%, at least 84%, at least 85%, at least 86%, at least 87%, at least 88%, at least 89%, at least 90%, at least 91%, at least 92%, at least 93%, at least 94%, at least 95%, at least 96%, at least 97%, at least 98%, or at least 99% identity to SEQ ID NO: 721, 724, or 725. In some embodiments, an Fc domain comprises an amino acid sequence of SEQ ID NO: 721, 724, or 725.

[0092] In some embodiments, a polypeptide can associate with another polypeptide. In some embodiments, the polypeptide associated with another polypeptide forms a dimer molecule. In some embodiments, the polypeptide comprises a first polypeptide and a second polypeptide. In some embodiments, the first polypeptide comprises a knob mutation, and the second polypeptide comprises a hole mutation. In some embodiments, the first polypeptide comprises a hole mutation, and the second polypeptide comprises a knob mutation. In some embodiments, the knob mutation is such as those provided herein. In some embodiments, the hole mutation is such as those provided herein. In some embodiments, the knob mutation is any knob mutation known in the art. In some embodiments, the hole mutation is any hole mutation known in the art.

[0093] In some embodiments, non-limiting examples of knob mutations include T366W, T366Y, Y407R, or S354C mutations as compared to:

(SEQ ID NO: 252)
ASTKGPSVFPLAPSSKSTSGGTAALGCLVKDYFPEPVTVSWNSGAL
TSGVHTFPAVLQSSGLYSLSSVVTVPSSSLGTQTYICNVNHKPSNT
KVDKKVEPKSCDKTHTCPPCPAPELLGGPSVFLFPPKPKDTLMISR
TPEVTCVVVDVSHEDPEVKFNWYVDGVEVHNAKTKPREEQYNSTYR
VVSVLTVLHQDWLNGKEYKCKVSNKALPAPIEKTISKAKGQPREPQ
VYTLPPSRDELTKNQVSLTCLVKGFYPSDIAVEWESNGQPENNYKT
TPPVLDSDGSFFLYSKLTVDKSRWQQGNVFSCSVMHEALHNHYTQK
SLSLSPGK,

according to EU numbering.

[0094] In some embodiments, non-limiting examples of hole mutations include Y349C, E357T, Y407A, Y407D, or Y407S mutations as compared to SEQ ID NO: 252, according to EU numbering.

[0095] In some embodiments, the Fc domain comprises a set of at least one knob mutation selected from T366W, T366Y, Y407R, S354C mutations, or any know mutation known in the art, as compared to SEQ ID NO: 252, according to EU numbering, and at least one hole mutation selected from Y349C, E357T, Y407A, Y407D, Y407S mutations, or any hole mutation known in the art, as compared to SEQ ID NO: 252, according to EU numbering.

[0096] In some embodiments, the knob mutation is such as those provided in:

(SEQ ID NO: 253)
DKTHTCPPCPAPEAAGAPSVFLFPPKPKDTLMISRTPEVTCVVVDV
SHEDPEVKFNWYVDGVEVHNAKTKPREEQQNSTYRVVSVLTVLHQD
WLNGKEYKCKVSNKALKAPIEKTISKAKGQPREPQVYTLPPSRDEL
TKNQVSLWCLVKGFYPSDIAVEWESNGQPENNYKTTPPVLDSDGSF
FLYSKLTVDKSRWQQGNVFSCSVMHEALHNHYTQKSLSLSPG,
(SEQ ID NO: 254)
DKTHTCPPCPAPEAAGAPSVFLFPPKPKDTLMISRTPEVTCVVVDV
SHEDPEVKFNWYVDGVEVHNAKTKPREEQQNSTYRVVSVLTVLHQD
WLNGKEYKCKVSNKALKAPIEKTISKAKGQPREPQVYTLPPCRDEL
TKNQVSLWCLVKGFYPSDIAVEWESNGQPENNYKTTPPVLDSDGSF
FLYSKLTVDKSRWQQGNVFSCSVMHEALHNHYTQKSLSLSPG,
or
(SEQ ID NO: 722)
DKTHTCPPCPAPEAAGAPSVFLFPPKPKDTLMISRTPEVTCVVVDV
SHEDPEVKFNWYVDGVEVHNAKTKPREEQQNSTYRVVSVLIVLHQD
WLNGKEYKCKVSNKALKAPIEKTISKAKGQPREPQVYTLPPSRDEL
TKNQVSLWCLVKGFYPSDIAVEWESNGQPENNYKTTPPVLDSDGSF
FLYSKLTVDKSRWQQGNVFSCSVLHEALHSHYTQKSLSLSPG.
In some embodiments, the hole mutation is such
as those provided in:
(SEQ ID NO: 255)
DKTHTCPPCPAPEAAGAPSVFLFPPKPKDTLMISRTPEVTCVVVDV
SHEDPEVKFNWYVDGVEVHNAKTKPREEQQNSTYRVVSVLTVLHQD
WLNGKEYKCKVSNKALKAPIEKTISKAKGQPREPQVYTLPPSRDEL
TKNQVSLSCAVKGFYPSDIAVEWESNGQPENNYKTTPPVLDSDGSF
FLVSKLTVDKSRWQQGNVFSCSVMHEALHNHYTQKSLSLSPG,
(SEQ ID NO: 256)
DKTHTCPPCPAPEAAGAPSVFLFPPKPKDTLMISRTPEVTCVVVDV
SHEDPEVKFNWYVDGVEVHNAKTKPREEQQNSTYRVVSVLTVLHQD
WLNGKEYKCKVSNKALKAPIEKTISKAKGQPREPQVCTLPPSRDEL
TKNQVSLSCAVKGFYPSDIAVEWESNGQPENNYKTTPPVLDSDGSF
FLVSKLTVDKSRWQQGNVFSCSVMHEALHNHYTQKSLSLSPG,
or
(SEQ ID NO: 723)
DKTHTCPPCPAPEAAGAPSVFLFPPKPKDTLMISRTPEVTCVVVDV
SHEDPEVKFNWYVDGVEVHNAKTKPREEQQNSTYRVVSVLTVLHQD
WLNGKEYKCKVSNKALKAPIEKTISKAKGQPREPQVYTLPPSRDEL
TKNQVSLSCAVKGFYPSDIAVEWESNGQPENNYKTTPPVLDSDGSF
FLVSKLTVDKSRWQQGNVFSCSVLHEALHSHYTQKSLSLSPG.

[0097] In some embodiments, an Fc domain comprises an amino acid sequence having at least 51%, at least 52%, at least 53%, at least 54%, at least 55%, at least 56%, at least 57%, at least 58%, at least 59%, at least 60%, at least 61%, at least 62%, at least 63%, at least 64%, at least 65%, at least 66%, at least 67%, at least 68%, at least 69%, at least 70%, at least 71%, at least 72%, at least 73%, at least 74%, at least 75%, at least 76%, at least 77%, at least 78%, at least 79%, at least 80%, at least 81%, at least 82%, at least 83%, at least 84%, at least 85%, at least 86%, at least 87%, at least 88%, at least 89%, at least 90%, at least 91%, at least 92%, at least 93%, at least 94%, at least 95%, at least 96%, at least 97%, at least 98%, or at least 99% identity to SEQ ID NO: 253, 254, 255, 256, 722, or 723.

[0098] In some embodiments, a composition comprises an Fc dimer comprising a first Fc domain comprising an amino acid sequence having at least 51%, at least 52%, at least 53%, at least 54%, at least 55%, at least 56%, at least 57%, at least 58%, at least 59%, at least 60%, at least 61%, at least 62%, at least 63%, at least 64%, at least 65%, at least 66%, at least 67%, at least 68%, at least 69%, at least 70%, at least 71%, at least 72%, at least 73%, at least 74%, at least 75%, at least 76%, at least 77%, at least 78%, at least 79%, at least 80%, at least 81%, at least 82%, at least 83%, at least 84%, at least 85%, at least 86%, at least 87%, at least 88%, at least 89%, at least 90%, at least 91%, at least 92%, at least 93%, at least 94%, at least 95%, at least 96%, at least 97%, at least 98%, or at least 99% identity to SEQ ID NO: 253, 254, or 722; and a second Fc domain comprising an amino acid sequence having at least 51%, at least 52%, at least 53%, at least 54%, at least 55%, at least 56%, at least 57%, at least 58%, at least 59%, at least 60%, at least 61%, at least 62%, at least 63%, at least 64%, at least 65%, at least 66%, at least 67%, at least 68%, at least 69%, at least 70%, at least 71%, at least 72%, at least 73%, at least 74%, at least 75%, at least 76%, at least 77%, at least 78%, at least 79%, at least 80%, at least 81%, at least 82%, at least 83%, at least 84%, at least 85%, at least 86%, at least 87%, at least 88%, at least 89%, at least 90%, at least 91%, at least 92%, at least 93%, at least 94%, at least 95%, at least 96%, at least 97%, at least 98%, or at least 99% identity to SEQ ID NO: 255, 256, or 723.

[0099] In some embodiments, a composition comprises an Fc dimer comprising a first Fc domain comprising an amino acid sequence having at least 51%, at least 52%, at least 53%, at least 54%, at least 55%, at least 56%, at least 57%, at least 58%, at least 59%, at least 60%, at least 61%, at least 62%, at least 63%, at least 64%, at least 65%, at least 66%, at least 67%, at least 68%, at least 69%, at least 70%, at least 71%, at least 72%, at least 73%, at least 74%, at least 75%, at least 76%, at least 77%, at least 78%, at least 79%, at least 80%, at least 81%, at least 82%, at least 83%, at least 84%, at least 85%, at least 86%, at least 87%, at least 88%, at least 89%, at least 90%, at least 91%, at least 92%, at least 93%, at least 94%, at least 95%, at least 96%, at least 97%, at least 98%, or at least 99% identity to SEQ ID NO: 253; and a second Fc domain comprising an amino acid sequence having at least 51%, at least 52%, at least 53%, at least 54%, at least 55%, at least 56%, at least 57%, at least 58%, at least 59%, at least 60%, at least 61%, at least 62%, at least 63%, at least 64%, at least 65%, at least 66%, at least 67%, at least 68%, at least 69%, at least 70%, at least 71%, at least 72%, at least 73%, at least 74%, at least 75%, at least 76%, at least 77%, at least 78%, at least 79%, at least 80%, at least 81%, at least 82%, at least 83%, at least 84%, at least 85%, at least 86%, at least 87%, at least 88%, at least 89%, at least 90%, at least 91%, at least 92%, at least 93%, at least 94%, at least 95%, at least 96%, at least 97%, at least 98%, or at least 99% identity to SEQ ID NO: 255. In some embodiments, a composition comprises an Fc dimer comprising a first Fc domain comprising an amino acid sequence having at least 51%, at least 52%, at least 53%, at least 54%, at least 55%, at least 56%, at least 57%, at least 58%, at least 59%, at least 60%, at least 61%, at least 62%, at least 63%, at least 64%, at least 65%, at least 66%, at least 67%, at least 68%, at least 69%, at least 70%, at least 71%, at least 72%, at least 73%, at least 74%, at least 75%, at least 76%, at least 77%, at least 78%, at least 79%, at least 80%, at least 81%, at least 82%, at least 83%, at least 84%, at least 85%, at least 86%, at least 87%, at least 88%, at least 89%, at least 90%, at least 91%, at least 92%, at least 93%, at least 94%, at least 95%, at least 96%, at least 97%, at least 98%, or at least 99% identity to SEQ ID NO: 254; and a second Fc domain comprising an amino acid sequence having at least 51%, at least 52%, at least 53%, at least 54%, at least 55%, at least 56%, at least 57%, at least 58%, at least 59%, at least 60%, at least 61%, at least 62%, at least 63%, at least 64%, at least 65%, at least 66%, at least 67%, at least 68%, at least 69%, at least 70%, at least 71%, at least 72%, at least 73%, at least 74%, at least 75%, at least 76%, at least 77%, at least 78%, at least 79%, at least 80%, at least 81%, at least 82%, at least 83%, at least 84%, at least 85%, at least 86%, at least 87%, at least 88%, at least 89%, at least 90%, at least 91%, at least 92%, at least 93%, at least 94%, at least 95%, at least 96%, at least 97%, at least 98%, or at least 99% identity to SEQ ID NO: 256. In some embodiments, a composition comprises an Fc dimer comprising a first Fc domain comprising an amino acid sequence having at least 51%, at least 52%, at least 53%, at least 54%, at least 55%, at least 56%, at least 57%, at least 58%, at least 59%, at least 60%, at least 61%, at least 62%, at least 63%, at least 64%, at least 65%, at least 66%, at least 67%, at least 68%, at least 69%, at least 70%, at least 71%, at least 72%, at least 73%, at least 74%, at least 75%, at least 76%, at least 77%, at least 78%, at least 79%, at least 80%, at least 81%, at least 82%, at least 83%, at least 84%, at least 85%, at least 86%, at least 87%, at least 88%, at least 89%, at least 90%, at least 91%, at least 92%, at least 93%, at least 94%, at least 95%, at least 96%, at least 97%, at least 98%, or at least 99% identity to SEQ ID NO: 722; and a second Fc domain comprising an amino acid sequence having at least 51%, at least 52%, at least 53%, at least 54%, at least 55%, at least 56%, at least 57%, at least 58%, at least 59%, at least 60%, at least 61%, at least 62%, at least 63%, at least 64%, at least 65%, at least 66%, at least 67%, at least 68%, at least 69%, at least 70%, at least 71%, at least 72%, at least 73%, at least 74%, at least 75%, at least 76%, at least 77%, at least 78%, at least 79%, at least 80%, at least 81%, at least 82%, at least 83%, at least 84%, at least 85%, at least 86%, at least 87%, at least 88%, at least 89%, at least 90%, at least 91%, at least 92%, at least 93%, at least 94%, at least 95%, at least 96%, at least 97%, at least 98%, or at least 99% identity to SEQ ID NO: 723.

[0100] In some embodiments, an Fc domain comprises an amino acid sequence of SEQ ID NO: 253, 254, 255, 256, 722, or 723.

[0101] In some embodiments, a composition comprises an Fc dimer comprising a first Fc domain comprising an amino acid sequence of SEQ ID NO: 253, 254, or 722; and a second Fc domain comprising an amino acid sequence of SEQ ID NO: 255, 256, or 723.

[0102] In some embodiments, a composition comprises an Fc dimer comprising a first Fc domain comprising an amino acid sequence of SEQ ID NO: 253; and a second Fc domain comprising an amino acid sequence of SEQ ID NO: 255. In some embodiments, a composition comprises an Fc dimer comprising a first Fc domain comprising an amino acid sequence of SEQ ID NO: 254; and a second Fc domain comprising an amino acid sequence of SEQ ID NO: 256. In some embodiments, a composition comprises an Fc dimer comprising a first Fc domain comprising an amino acid sequence of SEQ ID NO: 722; and a second Fc domain comprising an amino acid sequence of SEQ ID NO: 723.

[0103] In some embodiments, a first Fc polypeptide comprises a T366W substitution and the second Fc polypeptide comprises T366S, L368A, and Y407V substitutions. The numbering referenced here in Fc domains is according to EU numbering, which is a standard used for numbering/identifying residues in Fc domains. In some embodiments, the first and second polypeptides that form a heterodimer also comprise cysteine substitutions (a residue on each is changed to a cysteine). In some embodiments, the substitution is at position 354 (EU numbering) and/or position 349 (EU numbering). In some embodiments, the substitution is a S354C substitution. In some embodiments, the substitution is Y349C substitution. Without being bound to any theory, the presence of cysteines on the first and second polypeptides can facilitate the formation of the dimer (homodimer or heterodimer by allowing the formation of disulfide bond. Thus, in some embodiments, the first polypeptide comprises S354C and T366W substitutions and the second polypeptide comprises Y349C, T366S, L368A, and Y407V substitutions. Other knob-in-hole Fc heterodimer mutations can be used and the cysteine substitutions can also be made in combination with those known knob-in-hole formats.

[0104] Thus, in some embodiments, a dimer molecule comprises a first polypeptide and a second polypeptide, which can be the same or different. If different, the dimer can be referred to as a heterodimer. If the Fc domains are the same, the dimer can be referred to as a heterodimer. In some embodiments, the first molecule comprises a protease conjugated to an Fc domain, or an Fc domain. In some embodiments, the second molecule comprises a protease conjugated to an Fc domain, or an Fc domain. In some embodiments, the first polypeptide comprises a protease conjugated to an Fc domain, and the second polypeptide comprises an Fc domain. Thus, in some embodiments, the second polypeptide comprising an Fc does not contain or promise a protease, such as those provided for herein. A molecule that has two Fc polypeptides and only one protease polypeptide linked to one of the Fc molecules is considered to be a monovalent protease molecule because it only has one protease domain or polypeptide. Thus, in some embodiments, a monovalent protease polypeptide is provided for herein, wherein the polypeptide comprises two Fc domains, which can be as provided for herein, and one protease polypeptide domain linked to one of the Fc domains. In some embodiments, the first polypeptide comprises an Fc domain, and the second polypeptide comprises a protease conjugated to an Fc domain. In some embodiments, the Fc domain comprises knob in hole mutations. In some embodiments, the Fc domain forms a dimer. In some embodiments, the Fc domain of the first polypeptide and the second polypeptide form a dimer.

[0105] A protease molecule that is monovalent is illustrated in a non-limiting embodiment shown below, which can be referred to as FIG. 3. In reference to FIG. 3, the left panel illustrates a non-limiting example of a bivalent protease, which is formed by having a Fc homodimer, where each member of the homodimer is a Fc polypeptide (10). In the homodimer the Fc polypeptides are identical, which is illustrated by them both being labeled as Fc1 (the subscript for an illustrated Fc domain, whether it is Fc1 or Fc2, is for notation purposes only to show that the Fc domains form a homodimer or heterodimer and is not meant to make a reference to different immunoglobulin subclasses or allotypes). The Ig Protease (20) is linked to the Fc domain, which can be direct, or as illustrated above and provided for herein, via a peptide linker (25). The left panel illustrates the bivalent protease having two Ig Protease domains (20). As used herein, the term “bivalent protease” refers to a polypeptide molecule having two protease polypeptide domains. In the right panel, a non-limiting example of a monovalent protease polypeptide is illustrated. As illustrated in the right panel, the monovalent protease polypeptide comprises a heterodimer Fc polypeptide, where the heterodimer is made up of a first Fc domain, Fc1 (10), and a second, different, Fc domain Fc2 (15). The right panel illustrates one Ig protease domain (20) being linked to only one of the Fc polypeptides. As provided for herein, this linkage can be via a peptide linker (25). In some embodiments, the peptide linker (25) is any peptide linker, such as but not limited to those provided herein. Additionally, although as illustrated in FIG. 3, and in certain examples provided for herein, the protease is shown linked to one Fc polypeptide, such as the one containing what are referred to as “knob” substitutions, the protease could also be linked to the other Fc polypeptide, which can be referred to as having “hole” substitutions. Examples of such knob and hole substitutions are provided for herein and are known to one of skill in the art. Thus, the protease polypeptide domain in a monovalent protease can be linked to either of the Fc polypeptides that form the Fc heterodimer.

[0106] Although illustrated as being linked to the C-terminus of the Fc domain in FIG. 3 and in the table below, the Ig protease polypeptide could be linked to the N-terminus of the Fc domain directly or also through a peptide linker as provided for herein. Accordingly, in some embodiments, the polypeptide is conjugated to an Fc domain via a linker, such as a peptide linker provided for herein. In some embodiments, the polypeptide is conjugated to an Fc domain. In some embodiments, the N-terminal of the polypeptide is conjugated to the Fc domain. In some embodiments, the C-terminal of the polypeptide is conjugated to the Fc domain. In some embodiments, the N-terminal of the polypeptide is conjugated to an Fc domain via a linker, such as a peptide linker provided for herein. In some embodiments, the C-terminal of the polypeptide is conjugated to an Fc domain via a linker, such as a peptide linker provided for herein.

[0107] In some embodiments, the dimer is a homodimer molecule. In some embodiments, the dimer is a heterodimer molecule.

[0108] As used herein, the term “non-covalently conjugated” can mean that a polypeptide is tethered to another polypeptide through a linker. In some embodiments, the linker is a peptide linker. Non-limiting examples of peptide linkers that can be used are known in the art and are provide for herein.

[0109] As discussed herein the different domains, molecules, or polypeptide can be linked together with a linker domain or region. Any linker region described herein can be used as a linker. Linkers can be for example, glycine/serine linkers. In some embodiments, the linker can comprise one or more repeats of GGGGS (SEQ ID NO: 260). In some embodiments, the linker comprises 1, 2, 3, 4, or 5 repeats. In some embodiments, the linker comprises the sequence of GGGGSGGGGS (SEQ ID NO: 261). In some embodiments, the linker comprises the sequence of GGGGSGGGGSGGGGS (SEQ ID NO: 262). In some embodiments, the linker comprises the sequence of GGGGSGGGGSGGGGSG (SEQ ID NO: 263). In some embodiments, the linker comprises the amino acid sequence of GGGSK (SEQ ID NO: 264), which can be repeated 1-4 times, which can be represented as (GGGSK) n, where n is 1-4. Thus, in some embodiments, the linker can comprise the amino acid sequence of GGGSKGGGSK (SEQ ID NO: 265), GGGSKGGGSKGGGSK (SEQ ID NO: 266), or GGGSKGGGSKGGGSKGGGSK (SEQ ID NO: 267). In some embodiments, the linker comprises the sequence of GGGGSGGGGSGGGGSGGGGSG (SEQ ID NO: 268). In some embodiments, the linker comprises the sequence of GGGGSGGGGSG (SEQ ID NO: 269). In some embodiments, the linker comprises: GGGGS (SEQ ID NO: 260), (GGGGS) 3 (SEQ ID NO: 262), (GGGGS) n (n=1, 2, 3, 4) (SEQ ID NO: 260, SEQ ID NO: 261, SEQ ID NO: 262, SEQ ID NO: 270, respectively), (Gly): (SEQ ID NO: 271), (Gly) 6 (SEQ ID NO: 272), (EAAAK) 3 (SEQ ID NO: 273), (EAAK) n (n=1-3) (SEQ ID NO: 274, SEQ ID NO: 275, SEQ ID NO: 276, respectively), A (EAAAK) 4ALEA (EAAAK) 4A (SEQ ID NO: 277), AEAAAKEAAAKA (SEQ ID NO: 278), or AEEEKAEEEKAEEEK (SEQ ID NO: 279). These linkers can be used in any of the compounds or compositions provided herein.

[0110] In some embodiments, a molecule, or a composition comprises a first polypeptide comprising an amino acid sequence having at least 50%, at least 70%, at least 75%, at least 80%, at least 85%, at least 90%, at least 91%, at least 92%, at least 93%, at least 94%, at least 95%, at least 96%, at least 97%, at least 98%, or at least 99%, or 100% sequence identity to:

(SEQ ID NO: 257)
DKTHTCPPCPAPEAAGAPSVFLFPPKPKDTLMISRTPEVTCVVVDV
SHEDPEVKFNWYVDGVEVHNAKTKPREEQQNSTYRVVSVLTVLHQD
WLNGKEYKCKVSNKALKAPIEKTISKAKGQPREPQVYTLPPSRDEL
TKNQVSLWCLVKGFYPSDIAVEWESNGQPENNYKTTPPVLDSDGSF
FLYSKLTVDKSRWQQGNVFSCSVMHEALHNHYTQKSLSLSPGAEEE
KAEEEKAEEEKTALGRRKAEDRIKETLWADGVKIDEKDFEHIKSSH
EDYFAVEYGKGSGYYDVNKKMDSEDSALCVGAVVTNMFHWWVDQNR
ENIEKFKKQDPENNGVMKFEGVKEATVDELNEFYRDNRDNYADQSR
FFDLIKKHFGNKALNPEELFELYFNGFYYGSSHRYIEDNEPAQNNL
FSKVLENNKLLNPERSYGIDGFSNNVINALKSHKVLGLVYTTPLRY
RHIISMWGADIDQDGKVKAIYVTDSDDREITFNDNSKRRIGMIRYD
VLVDDNGNIRFTGKGATHKEEGAIYAGLYSLSRGDEVWEDYFKKYP
EVQENL;

and
a second polypeptide comprising an amino acid sequence having at least 50%, at least 70%, at least 75%, at least 80%, at least 85%, at least 90%, at least 91%, at least 92%, at least 93%, at least 94%, at least 95%, at least 96%, at least 97%, at least 98%, or at least 99%, or 100% sequence identity to SEQ ID NO: 255.

[0111] In some embodiments, a molecule, or a composition comprises a first polypeptide comprising an amino acid sequence having at least 50%, at least 70%, at least 75%, at least 80%, at least 85%, at least 90%, at least 91%, at least 92%, at least 93%, at least 94%, at least 95%, at least 96%, at least 97%, at least 98%, or at least 99%, or 100% sequence identity to:

(SEQ ID NO: 258)
TALGRRKAEDRIKETLWADGVKIDEKDFEHIKSSHEDYFAVEYGKG
SGYYDVNKKMDSEDSALCVGAVVTNMFHWWVDQNRENIEKFKKQDP
ENNGVMKFEGVKEATVDELNEFYRDNRDNYADQSRFFDLIKKHFGN
KALNPEELFELYFNGFYYGSSHRYIEDNEPAQNNLFSKVLENNKLL
NPERSYGIDGFSNNVINALKSHKVLGLVYTTPLRYRHIISMWGADI
DQDGKVKAIYVTDSDDREITFNDNSKRRIGMIRYDVLVDDNGNIRF
TGKGATHKEEGAIYAGLYSLSRGDEVWEDYFKKYPEVQENLDKTHT
CPPCPAPEAAGAPSVFLFPPKPKDTLMISRTPEVTCVVVDVSHEDP
EVKFNWYVDGVEVHNAKTKPREEQQNSTYRVVSVLIVLHQDWLNGK
EYKCKVSNKALKAPIEKTISKAKGQPREPQVYTLPPSRDELTKNQV
SLWCLVKGFYPSDIAVEWESNGQPENNYKTTPPVLDSDGSFFLYSK
LTVDKSRWQQGNVFSCSVMHEALHNHYTQKSLSLSPG;

and
a second polypeptide comprising an amino acid sequence having at least 50%, at least 70%, at least 75%, at least 80%, at least 85%, at least 90%, at least 91%, at least 92%, at least 93%, at least 94%, at least 95%, at least 96%, at least 97%, at least 98%, or at least 99%, or 100% sequence identity to SEQ ID NO: 255.

[0112] In some embodiments, a molecule, or a composition comprises a first polypeptide comprising an amino acid sequence having at least 50%, at least 70%, at least 75%, at least 80%, at least 85%, at least 90%, at least 91%, at least 92%, at least 93%, at least 94%, at least 95%, at least 96%, at least 97%, at least 98%, or at least 99%, or 100% sequence identity to:

(SEQ ID NO: 259)
TALGRRKAEDRIKETLWADGVKIDEKDFEHIKSSHEDYFAVEYGKG
SGYYDVNKKMDSEDSALCVGAVVTNMFHWWVDQNRENIEKFKKQDP
ENNGVMKFEGVKEATVDELNEFYRDNRDNYADQSRFFDLIKKHFGN
KALNPEELFELYFNGFYYGSSHRYIEDNEPAQNNLFSKVLENNKLL
NPERSYGIDGFSNNVINALKSHKVLGLVYTTPLRYRHIISMWGADI
DQDGKVKAIYVTDSDDREITFNDNSKRRIGMIRYDVLVDDNGNIRF
TGKGATHKEEGAIYAGLYSLSRGDEVWEDYFKKYPEVQENLDKTHT
CPPCPAPEAAGAPSVFLFPPKPKDTLMISRTPEVTCVVVDVSHEDP
EVKFNWYVDGVEVHNAKTKPREEQQNSTYRVVSVLTVLHQDWLNGK
EYKCKVSNKALKAPIEKTISKAKGQPREPQVYTLPPSRDELTKNQV
SLTCLVKGFYPSDIAVEWESNGQPENNYKTTPPVLDSDGSFFLYSK
LTVDKSRWQQGNVFSCSVMHEALHNHYTQKSLSLSPG;

and
a second polypeptide comprising an amino acid sequence having at least 50%, at least 70%, at least 75%, at least 80%, at least 85%, at least 90%, at least 91%, at least 92%, at least 93%, at least 94%, at least 95%, at least 96%, at least 97%, at least 98%, or at least 99%, or 100% sequence identity to SEQ ID NO: 259.

[0113] In some embodiments, a molecule, or a composition comprises a first polypeptide comprising an amino acid sequence having at least 50%, at least 70%, at least 75%, at least 80%, at least 85%, at least 90%, at least 91%, at least 92%, at least 93%, at least 94%, at least 95%, at least 96%, at least 97%, at least 98%, or at least 99%, or 100% sequence identity to SEQ ID NO: 380, 251, 5-243, 247, 280-379, 381-528, 737, 745-823, 828-864, or 885-916; and a second polypeptide comprising an Fc domain, such as those provided for herein. In some embodiments, a molecule, or a composition comprises a first polypeptide comprising an amino acid sequence having at least 50%, at least 70%, at least 75%, at least 80%, at least 85%, at least 90%, at least 91%, at least 92%, at least 93%, at least 94%, at least 95%, at least 96%, at least 97%, at least 98%, or at least 99%, or 100% sequence identity to SEQ ID NO: 380, 251, 5-243, 247, 280-379, 381-528, 737, 745-823, 828-864, or 885-916; and a second polypeptide comprising an amino acid sequence having at least 50%, at least 70%, at least 75%, at least 80%, at least 85%, at least 90%, at least 91%, at least 92%, at least 93%, at least 94%, at least 95%, at least 96%, at least 97%, at least 98%, or at least 99%, or 100% sequence identity to SEQ ID NO: 253, 254, 255, or 256. In some embodiments, a molecule, or a composition comprises a first polypeptide comprising an amino acid sequence having at least 50%, at least 70%, at least 75%, at least 80%, at least 85%, at least 90%, at least 91%, at least 92%, at least 93%, at least 94%, at least 95%, at least 96%, at least 97%, at least 98%, or at least 99%, or 100% sequence identity to SEQ ID NO: 380, 251, 5-243, 247, 280-379, 381-528, 737, 745-823, 828-864, or 885-916; and a second polypeptide comprising an amino acid sequence having at least 50%, at least 70%, at least 75%, at least 80%, at least 85%, at least 90%, at least 91%, at least 92%, at least 93%, at least 94%, at least 95%, at least 96%, at least 97%, at least 98%, or at least 99%, or 100% sequence identity to SEQ ID NO: 380, 251, 5-243, 247, 280-379, 381-528, 737, 745-823, 828-864, or 885-916.

[0114] In some embodiments, a molecule, or a composition comprises a first polypeptide comprising an amino acid sequence of SEQ ID NO: 380, 251, 5-243, 247, 280-379, 381-528, 737, 745-823, 828-864, or 885-916; and a second polypeptide comprising an Fc domain, such as those provided for herein. In some embodiments, a molecule, or a composition comprises a first polypeptide comprising an amino acid sequence of SEQ ID NO: 380, 251, 5-243, 247, 280-379, 381-528, 737, 745-823, 828-864, or 885-916, or 737; and a second polypeptide comprising an amino acid sequence of SEQ ID NO: 253, 254, 255, or 256. In some embodiments, a molecule, or a composition comprises a first polypeptide comprising an amino acid sequence of SEQ ID NO: 380, 251, 5-243, 247, 280-379, 381-528, 737, 745-823, 828-864, or 885-916; and a second polypeptide comprising an amino acid sequence of SEQ ID NO: 380, 251, 5-243, 247, 280-379, 381-528, 737, 745-823, 828-864, or 885-916.

[0115] In some embodiments, a molecule, or a composition comprises a first polypeptide comprising an amino acid sequence of SEQ ID NO: 257, or 258; and a second polypeptide comprising an amino acid sequence of SEQ ID NO: 253, 254, 255, or 256.

[0116] In some embodiments, a molecule, or a composition comprises a first polypeptide comprising an amino acid sequence of SEQ ID NO: 257; and a second polypeptide comprising an Fc domain, such as those provided for herein. In some embodiments, a molecule, or a composition comprises a first polypeptide comprising an amino acid sequence of SEQ ID NO: 257; and a second polypeptide comprising an amino acid sequence of SEQ ID NO: 255.

[0117] In some embodiments, a molecule, or a composition comprises a first polypeptide comprising an amino acid sequence of SEQ ID NO: 258; and a second polypeptide comprising an Fc domain, such as those provided for herein. In some embodiments, a molecule, or a composition comprises a first polypeptide comprising an amino acid sequence of SEQ ID NO: 258; and a second polypeptide comprising an amino acid sequence of SEQ ID NO: 255.

[0118] In some embodiments, a molecule, or a composition comprises a first polypeptide comprising an amino acid sequence of SEQ ID NO: 259; and a second polypeptide comprising an Fc domain, such as those provided for herein. In some embodiments, a molecule, or a composition comprises a first polypeptide comprising an amino acid sequence of SEQ ID NO: 259; and a second polypeptide comprising an amino acid sequence of SEQ ID NO: 259.

[0119] In some embodiments, a molecule, or a composition comprises an amino acid sequence selected from any one in Table 6 below.

TABLE 6

| | Fc | Linker | Protease | Full Molecule |
|---|---|---|---|---|
| Name | Sequence | Sequence | Sequence | Sequence |
| FP1 | SEQ ID NO: 721 | SEQ ID NO: 726 | SEQ ID NO: 745 | SEQ ID NO: 529 |
| FP2 | SEQ ID NO: 721 | SEQ ID NO: 727 | SEQ ID NO: 746 | SEQ ID NO: 530 |
| FP3 | SEQ ID NO: 721 | SEQ ID NO: 727 | SEQ ID NO: 749 | SEQ ID NO: 531 |
| FP4 | SEQ ID NO: 721 | SEQ ID NO: 727 | SEQ ID NO: 748 | SEQ ID NO: 532 |
| FP5 | SEQ ID NO: 721 | SEQ ID NO: 727 | SEQ ID NO: 747 | SEQ ID NO: 533 |
| FP6 | SEQ ID NO: 721 | SEQ ID NO: 727 | SEQ ID NO: 916 | SEQ ID NO: 534 |
| FP7 | SEQ ID NO: 721 | SEQ ID NO: 727 | SEQ ID NO: 753 | SEQ ID NO: 535 |
| FP8 | SEQ ID NO: 721 | SEQ ID NO: 727 | SEQ ID NO: 751 | SEQ ID NO: 536 |
| FP9 | SEQ ID NO: 721 | SEQ ID NO: 727 | SEQ ID NO: 823 | SEQ ID NO: 537 |
| FP10 | SEQ ID NO: 721 | SEQ ID NO: 727 | SEQ ID NO: 752 | SEQ ID NO: 538 |
| FP11 | SEQ ID NO: 721 | SEQ ID NO: 727 | SEQ ID NO: 754 | SEQ ID NO: 539 |
| FP12 | SEQ ID NO: 721 | SEQ ID NO: 727 | SEQ ID NO: 755 | SEQ ID NO: 540 |
| FP13 | SEQ ID NO: 721 | SEQ ID NO: 727 | SEQ ID NO: 756 | SEQ ID NO: 541 |
| FP14 | SEQ ID NO: 721 | SEQ ID NO: 727 | SEQ ID NO: 757 | SEQ ID NO: 542 |
| FP15 | SEQ ID NO: 721 | SEQ ID NO: 727 | SEQ ID NO: 758 | SEQ ID NO: 543 |
| FP16 | SEQ ID NO: 721 | SEQ ID NO: 727 | SEQ ID NO: 750 | SEQ ID NO: 544 |
| FP17 | SEQ ID NO: 721 | SEQ ID NO: 728 | SEQ ID NO: 750 | SEQ ID NO: 545 |
| FP18 | SEQ ID NO: 721 | SEQ ID NO: 727 | SEQ ID NO: 759 | SEQ ID NO: 546 |
| FP19 | SEQ ID NO: 721 | SEQ ID NO: 727 | SEQ ID NO: 760 | SEQ ID NO: 547 |
| FP20 | SEQ ID NO: 721 | SEQ ID NO: 727 | SEQ ID NO: 761 | SEQ ID NO: 548 |
| FP21 | SEQ ID NO: 721 | SEQ ID NO: 727 | SEQ ID NO: 762 | SEQ ID NO: 549 |
| FP22 | SEQ ID NO: 721 | SEQ ID NO: 727 | SEQ ID NO: 763 | SEQ ID NO: 550 |
| FP23 | SEQ ID NO: 721 | SEQ ID NO: 727 | SEQ ID NO: 764 | SEQ ID NO: 551 |
| FP24 | SEQ ID NO: 721 | SEQ ID NO: 727 | SEQ ID NO: 765 | SEQ ID NO: 552 |
| FP25 | SEQ ID NO: 721 | SEQ ID NO: 727 | SEQ ID NO: 766 | SEQ ID NO: 553 |
| FP26 | SEQ ID NO: 721 | SEQ ID NO: 727 | SEQ ID NO: 767 | SEQ ID NO: 554 |
| FP27 | SEQ ID NO: 721 | SEQ ID NO: 727 | SEQ ID NO: 768 | SEQ ID NO: 555 |
| FP28 | SEQ ID NO: 721 | SEQ ID NO: 727 | SEQ ID NO: 769 | SEQ ID NO: 556 |
| FP29 | SEQ ID NO: 721 | SEQ ID NO: 727 | SEQ ID NO: 770 | SEQ ID NO: 557 |
| FP30 | SEQ ID NO: 721 | SEQ ID NO: 727 | SEQ ID NO: 771 | SEQ ID NO: 558 |
| FP31 | SEQ ID NO: 721 | SEQ ID NO: 727 | SEQ ID NO: 772 | SEQ ID NO: 559 |
| FP32 | SEQ ID NO: 721 | SEQ ID NO: 727 | SEQ ID NO: 773 | SEQ ID NO: 560 |
| FP33 | SEQ ID NO: 721 | SEQ ID NO: 727 | SEQ ID NO: 774 | SEQ ID NO: 561 |
| FP34 | SEQ ID NO: 721 | SEQ ID NO: 727 | SEQ ID NO: 775 | SEQ ID NO: 562 |
| FP35 | SEQ ID NO: 721 | SEQ ID NO: 727 | SEQ ID NO: 776 | SEQ ID NO: 563 |
| FP36 | SEQ ID NO: 721 | SEQ ID NO: 727 | SEQ ID NO: 777 | SEQ ID NO: 564 |
| FP37 | SEQ ID NO: 721 | SEQ ID NO: 727 | SEQ ID NO: 778 | SEQ ID NO: 565 |
| FP38 | SEQ ID NO: 721 | SEQ ID NO: 727 | SEQ ID NO: 779 | SEQ ID NO: 566 |
| FP39 | SEQ ID NO: 721 | SEQ ID NO: 727 | SEQ ID NO: 780 | SEQ ID NO: 567 |
| FP40 | SEQ ID NO: 721 | SEQ ID NO: 727 | SEQ ID NO: 781 | SEQ ID NO: 568 |
| FP41 | SEQ ID NO: 721 | SEQ ID NO: 727 | SEQ ID NO: 782 | SEQ ID NO: 569 |
| FP42 | SEQ ID NO: 721 | SEQ ID NO: 727 | SEQ ID NO: 783 | SEQ ID NO: 570 |
| FP43 | SEQ ID NO: 721 | SEQ ID NO: 727 | SEQ ID NO: 784 | SEQ ID NO: 571 |
| FP44 | SEQ ID NO: 721 | SEQ ID NO: 727 | SEQ ID NO: 785 | SEQ ID NO: 572 |
| FP45 | SEQ ID NO: 721 | SEQ ID NO: 727 | SEQ ID NO: 786 | SEQ ID NO: 573 |
| FP46 | SEQ ID NO: 721 | SEQ ID NO: 727 | SEQ ID NO: 787 | SEQ ID NO: 574 |
| FP47 | SEQ ID NO: 721 | SEQ ID NO: 727 | SEQ ID NO: 788 | SEQ ID NO: 575 |
| FP48 | SEQ ID NO: 721 | SEQ ID NO: 727 | SEQ ID NO: 789 | SEQ ID NO: 576 |
| FP49 | SEQ ID NO: 721 | SEQ ID NO: 727 | SEQ ID NO: 790 | SEQ ID NO: 577 |
| FP50 | SEQ ID NO: 721 | SEQ ID NO: 727 | SEQ ID NO: 791 | SEQ ID NO: 578 |
| FP51 | SEQ ID NO: 721 | SEQ ID NO: 727 | SEQ ID NO: 792 | SEQ ID NO: 579 |
| FP52 | SEQ ID NO: 721 | SEQ ID NO: 727 | SEQ ID NO: 793 | SEQ ID NO: 580 |
| FP53 | SEQ ID NO: 721 | SEQ ID NO: 727 | SEQ ID NO: 794 | SEQ ID NO: 581 |
| FP54 | SEQ ID NO: 721 | SEQ ID NO: 727 | SEQ ID NO: 795 | SEQ ID NO: 582 |
| FP55 | SEQ ID NO: 721 | SEQ ID NO: 727 | SEQ ID NO: 796 | SEQ ID NO: 583 |
| FP56 | SEQ ID NO: 721 | SEQ ID NO: 727 | SEQ ID NO: 797 | SEQ ID NO: 584 |
| FP57 | SEQ ID NO: 721 | SEQ ID NO: 727 | SEQ ID NO: 798 | SEQ ID NO: 585 |
| FP58 | SEQ ID NO: 721 | SEQ ID NO: 727 | SEQ ID NO: 799 | SEQ ID NO: 586 |
| FP59 | SEQ ID NO: 721 | SEQ ID NO: 727 | SEQ ID NO: 800 | SEQ ID NO: 587 |
| FP60 | SEQ ID NO: 721 | SEQ ID NO: 727 | SEQ ID NO: 801 | SEQ ID NO: 588 |
| FP61 | SEQ ID NO: 721 | SEQ ID NO: 727 | SEQ ID NO: 802 | SEQ ID NO: 589 |
| FP62 | SEQ ID NO: 721 | SEQ ID NO: 727 | SEQ ID NO: 803 | SEQ ID NO: 590 |
| FP63 | SEQ ID NO: 721 | SEQ ID NO: 727 | SEQ ID NO: 804 | SEQ ID NO: 591 |
| FP64 | SEQ ID NO: 721 | SEQ ID NO: 727 | SEQ ID NO: 805 | SEQ ID NO: 592 |
| FP65 | SEQ ID NO: 721 | SEQ ID NO: 727 | SEQ ID NO: 806 | SEQ ID NO: 593 |
| FP66 | SEQ ID NO: 721 | SEQ ID NO: 727 | SEQ ID NO: 807 | SEQ ID NO: 594 |
| FP67 | SEQ ID NO: 721 | SEQ ID NO: 727 | SEQ ID NO: 808 | SEQ ID NO: 595 |
| FP68 | SEQ ID NO: 721 | SEQ ID NO: 727 | SEQ ID NO: 809 | SEQ ID NO: 596 |
| FP69 | SEQ ID NO: 721 | SEQ ID NO: 727 | SEQ ID NO: 810 | SEQ ID NO: 597 |
| FP70 | SEQ ID NO: 721 | SEQ ID NO: 727 | SEQ ID NO: 811 | SEQ ID NO: 598 |
| FP71 | SEQ ID NO: 721 | SEQ ID NO: 727 | SEQ ID NO: 812 | SEQ ID NO: 599 |
| FP72 | SEQ ID NO: 721 | SEQ ID NO: 727 | SEQ ID NO: 813 | SEQ ID NO: 600 |
| FP73 | SEQ ID NO: 721 | SEQ ID NO: 727 | SEQ ID NO: 814 | SEQ ID NO: 601 |
| FP74 | SEQ ID NO: 721 | SEQ ID NO: 727 | SEQ ID NO: 815 | SEQ ID NO: 602 |
| FP75 | SEQ ID NO: 721 | SEQ ID NO: 727 | SEQ ID NO: 816 | SEQ ID NO: 603 |
| FP76 | SEQ ID NO: 721 | SEQ ID NO: 727 | SEQ ID NO: 817 | SEQ ID NO: 604 |
| FP77 | SEQ ID NO: 721 | SEQ ID NO: 727 | SEQ ID NO: 818 | SEQ ID NO: 605 |
| FP78 | SEQ ID NO: 721 | SEQ ID NO: 727 | SEQ ID NO: 819 | SEQ ID NO: 606 |
| FP79 | SEQ ID NO: 721 | SEQ ID NO: 727 | SEQ ID NO: 820 | SEQ ID NO: 607 |
| FP80 | SEQ ID NO: 721 | SEQ ID NO: 727 | SEQ ID NO: 821 | SEQ ID NO: 608 |
| FP81 | SEQ ID NO: 721 | SEQ ID NO: 727 | SEQ ID NO: 822 | SEQ ID NO: 609 |
| FP82 | SEQ ID NO: 721 | SEQ ID NO: 727 | SEQ ID NO: 828 | SEQ ID NO: 610 |
| FP83 | SEQ ID NO: 721 | SEQ ID NO: 727 | SEQ ID NO: 829 | SEQ ID NO: 611 |
| FP84 | SEQ ID NO: 721 | SEQ ID NO: 727 | SEQ ID NO: 830 | SEQ ID NO: 612 |
| FP85 | SEQ ID NO: 721 | SEQ ID NO: 727 | SEQ ID NO: 831 | SEQ ID NO: 613 |
| FP86 | SEQ ID NO: 721 | SEQ ID NO: 727 | SEQ ID NO: 832 | SEQ ID NO: 614 |
| FP87 | SEQ ID NO: 721 | SEQ ID NO: 727 | SEQ ID NO: 833 | SEQ ID NO: 615 |
| FP88 | SEQ ID NO: 721 | SEQ ID NO: 727 | SEQ ID NO: 834 | SEQ ID NO: 616 |
| FP89 | SEQ ID NO: 721 | SEQ ID NO: 727 | SEQ ID NO: 835 | SEQ ID NO: 617 |
| FP90 | SEQ ID NO: 721 | SEQ ID NO: 727 | SEQ ID NO: 836 | SEQ ID NO: 618 |
| FP91 | SEQ ID NO: 721 | SEQ ID NO: 727 | SEQ ID NO: 837 | SEQ ID NO: 619 |
| FP92 | SEQ ID NO: 721 | SEQ ID NO: 727 | SEQ ID NO: 838 | SEQ ID NO: 620 |
| FP93 | SEQ ID NO: 721 | SEQ ID NO: 727 | SEQ ID NO: 839 | SEQ ID NO: 621 |
| FP94 | SEQ ID NO: 721 | SEQ ID NO: 727 | SEQ ID NO: 840 | SEQ ID NO: 622 |
| FP95 | SEQ ID NO: 721 | SEQ ID NO: 727 | SEQ ID NO: 841 | SEQ ID NO: 623 |
| FP96 | SEQ ID NO: 721 | SEQ ID NO: 727 | SEQ ID NO: 842 | SEQ ID NO: 624 |
| FP97 | SEQ ID NO: 721 | SEQ ID NO: 727 | SEQ ID NO: 843 | SEQ ID NO: 625 |
| FP98 | SEQ ID NO: 721 | SEQ ID NO: 727 | SEQ ID NO: 844 | SEQ ID NO: 626 |
| FP99 | SEQ ID NO: 721 | SEQ ID NO: 727 | SEQ ID NO: 845 | SEQ ID NO: 627 |
| FP100 | SEQ ID NO: 721 | SEQ ID NO: 727 | SEQ ID NO: 846 | SEQ ID NO: 628 |
| FP101 | SEQ ID NO: 721 | SEQ ID NO: 727 | SEQ ID NO: 847 | SEQ ID NO: 629 |
| FP102 | SEQ ID NO: 721 | SEQ ID NO: 727 | SEQ ID NO: 848 | SEQ ID NO: 630 |
| FP103 | SEQ ID NO: 721 | SEQ ID NO: 727 | SEQ ID NO: 849 | SEQ ID NO: 631 |
| FP104 | SEQ ID NO: 721 | SEQ ID NO: 727 | SEQ ID NO: 850 | SEQ ID NO: 632 |
| FP105 | SEQ ID NO: 721 | SEQ ID NO: 727 | SEQ ID NO: 851 | SEQ ID NO: 633 |
| FP106 | SEQ ID NO: 721 | SEQ ID NO: 727 | SEQ ID NO: 852 | SEQ ID NO: 634 |
| FP107 | SEQ ID NO: 721 | SEQ ID NO: 727 | SEQ ID NO: 853 | SEQ ID NO: 635 |
| FP108 | SEQ ID NO: 721 | SEQ ID NO: 727 | SEQ ID NO: 854 | SEQ ID NO: 636 |
| FP109 | SEQ ID NO: 721 | SEQ ID NO: 727 | SEQ ID NO: 855 | SEQ ID NO: 637 |
| FP110 | SEQ ID NO: 721 | SEQ ID NO: 727 | SEQ ID NO: 856 | SEQ ID NO: 638 |
| FP111 | SEQ ID NO: 721 | SEQ ID NO: 727 | SEQ ID NO: 857 | SEQ ID NO: 639 |
| FP112 | SEQ ID NO: 721 | SEQ ID NO: 727 | SEQ ID NO: 858 | SEQ ID NO: 640 |
| FP113 | SEQ ID NO: 721 | SEQ ID NO: 727 | SEQ ID NO: 859 | SEQ ID NO: 641 |
| FP114 | SEQ ID NO: 721 | SEQ ID NO: 727 | SEQ ID NO: 860 | SEQ ID NO: 642 |
| FP115 | SEQ ID NO: 721 | SEQ ID NO: 727 | SEQ ID NO: 861 | SEQ ID NO: 643 |
| FP116 | SEQ ID NO: 721 | SEQ ID NO: 727 | SEQ ID NO: 862 | SEQ ID NO: 644 |
| FP117 | SEQ ID NO: 721 | SEQ ID NO: 727 | SEQ ID NO: 863 | SEQ ID NO: 645 |
| FP118 | SEQ ID NO: 721 | SEQ ID NO: 727 | SEQ ID NO: 864 | SEQ ID NO: 646 |
| FP119 | SEQ ID NO: 721 | SEQ ID NO: 727 | SEQ ID NO: 885 | SEQ ID NO: 647 |
| FP120 | SEQ ID NO: 721 | SEQ ID NO: 727 | SEQ ID NO: 886 | SEQ ID NO: 648 |
| FP121 | SEQ ID NO: 721 | SEQ ID NO: 727 | SEQ ID NO: 378 | SEQ ID NO: 649 |
| FP122 | SEQ ID NO: 721 | SEQ ID NO: 727 | SEQ ID NO: 887 | SEQ ID NO: 650 |
| FP123 | SEQ ID NO: 721 | SEQ ID NO: 727 | SEQ ID NO: 888 | SEQ ID NO: 651 |
| FP124 | SEQ ID NO: 721 | SEQ ID NO: 727 | SEQ ID NO: 889 | SEQ ID NO: 652 |
| FP125 | SEQ ID NO: 721 | SEQ ID NO: 727 | SEQ ID NO: 890 | SEQ ID NO: 653 |
| FP126 | SEQ ID NO: 721 | SEQ ID NO: 727 | SEQ ID NO: 891 | SEQ ID NO: 654 |
| FP127 | SEQ ID NO: 721 | SEQ ID NO: 727 | SEQ ID NO: 892 | SEQ ID NO: 656 |
| FP128 | SEQ ID NO: 721 | SEQ ID NO: 727 | SEQ ID NO: 893 | SEQ ID NO: 657 |
| FP129 | SEQ ID NO: 721 | SEQ ID NO: 727 | SEQ ID NO: 894 | SEQ ID NO: 658 |
| FP130 | SEQ ID NO: 721 | SEQ ID NO: 727 | SEQ ID NO: 895 | SEQ ID NO: 659 |
| FP131 | SEQ ID NO: 721 | SEQ ID NO: 727 | SEQ ID NO: 896 | SEQ ID NO: 660 |
| FP132 | SEQ ID NO: 721 | SEQ ID NO: 261 | SEQ ID NO: 378 | SEQ ID NO: 661 |
| FP133 | SEQ ID NO: 721 | SEQ ID NO: 265 | SEQ ID NO: 378 | SEQ ID NO: 662 |
| FP134 | SEQ ID NO: 721 | SEQ ID NO: 266 | SEQ ID NO: 378 | SEQ ID NO: 663 |
| FP135 | SEQ ID NO: 721 | SEQ ID NO: 267 | SEQ ID NO: 378 | SEQ ID NO: 664 |
| FP136 | SEQ ID NO: 721 | SEQ ID NO: 729 | SEQ ID NO: 378 | SEQ ID NO: 665 |
| FP137 | SEQ ID NO: 721 | SEQ ID NO: 730 | SEQ ID NO: 378 | SEQ ID NO: 666 |
| FP138 | SEQ ID NO: 721 | SEQ ID NO: 731 | SEQ ID NO: 378 | SEQ ID NO: 667 |
| FP139 | SEQ ID NO: 721 | SEQ ID NO: 732 | SEQ ID NO: 378 | SEQ ID NO: 668 |
| FP140 | SEQ ID NO: 721 | SEQ ID NO: 733 | SEQ ID NO: 378 | SEQ ID NO: 669 |
| FP141 | SEQ ID NO: 253; | SEQ ID NO: 727 | SEQ ID NO: 378 | SEQ ID NO: 670 |
| | and | | | |
| | SEQ ID NO: 255 | | | |
| FP142 | SEQ ID NO: 254; | SEQ ID NO: 727 | SEQ ID NO: 378 | SEQ ID NO: 671 |
| | and | | | |
| | SEQ ID NO: 256 | | | |
| FP143 | SEQ ID NO: 724 | SEQ ID NO: 727 | SEQ ID NO: 378 | SEQ ID NO: 672 |
| FP144 | SEQ ID NO: 725 | SEQ ID NO: 727 | SEQ ID NO: 378 | SEQ ID NO: 673 |
| FP145 | SEQ ID NO: 721 | SEQ ID NO: 727 | SEQ ID NO: 380 | SEQ ID NO: 674 |
| FP146 | SEQ ID NO: 721 | SEQ ID NO: 727 | SEQ ID NO: 897 | SEQ ID NO: 675 |
| FP147 | SEQ ID NO: 721 | SEQ ID NO: 727 | SEQ ID NO: 898 | SEQ ID NO: 676 |
| FP148 | SEQ ID NO: 721 | SEQ ID NO: 727 | SEQ ID NO: 899 | SEQ ID NO: 677 |
| FP149 | SEQ ID NO: 721 | SEQ ID NO: 727 | SEQ ID NO: 900 | SEQ ID NO: 678 |
| FP150 | SEQ ID NO: 721 | SEQ ID NO: 727 | SEQ ID NO: 901 | SEQ ID NO: 679 |
| FP151 | SEQ ID NO: 721 | SEQ ID NO: 727 | SEQ ID NO: 902 | SEQ ID NO: 680 |
| FP152 | SEQ ID NO: 721 | SEQ ID NO: 727 | SEQ ID NO: 903 | SEQ ID NO: 681 |
| FP153 | SEQ ID NO: 721 | SEQ ID NO: 727 | SEQ ID NO: 904 | SEQ ID NO: 682 |
| FP154 | SEQ ID NO: 721 | SEQ ID NO: 727 | SEQ ID NO: 905 | SEQ ID NO: 683 |
| FP155 | SEQ ID NO: 721 | SEQ ID NO: 727 | SEQ ID NO: 906 | SEQ ID NO: 684 |
| FP156 | SEQ ID NO: 721 | SEQ ID NO: 727 | SEQ ID NO: 907 | SEQ ID NO: 685 |
| FP157 | SEQ ID NO: 721 | SEQ ID NO: 727 | SEQ ID NO: 908 | SEQ ID NO: 686 |
| FP158 | SEQ ID NO: 721 | SEQ ID NO: 727 | SEQ ID NO: 909 | SEQ ID NO: 687 |
| FP159 | SEQ ID NO: 721 | SEQ ID NO: 727 | SEQ ID NO: 910 | SEQ ID NO: 688 |
| FP160 | SEQ ID NO: 721 | SEQ ID NO: 727 | SEQ ID NO: 911 | SEQ ID NO: 689 |
| FP161 | SEQ ID NO: 721 | SEQ ID NO: 727 | SEQ ID NO: 912 | SEQ ID NO: 690 |
| FP162 | SEQ ID NO: 721 | SEQ ID NO: 727 | SEQ ID NO: 913 | SEQ ID NO: 691 |
| FP163 | SEQ ID NO: 721 | SEQ ID NO: 727 | SEQ ID NO: 914 | SEQ ID NO: 692 |
| FP164 | SEQ ID NO: 721 | SEQ ID NO: 727 | SEQ ID NO: 915 | SEQ ID NO: 693 |
| FP165 | SEQ ID NO: 722; | SEQ ID NO: 727 | SEQ ID NO: 378 | SEQ ID NO: 694 |
| | and | | | |
| | SEQ ID NO: 723 | | | |
| FP166 | SEQ ID NO: 724 | SEQ ID NO: 733 | SEQ ID NO: 378 | SEQ ID NO: 695 |
| FP167 | SEQ ID NO: 253; | SEQ ID NO: 733 | SEQ ID NO: 378 | SEQ ID NO: 696 |
| | and | | | |
| | SEQ ID NO: 255 | | | |
| FP168 | SEQ ID NO: 722; | SEQ ID NO: 733 | SEQ ID NO: 378 | SEQ ID NO: 697 |
| | and | | | |
| | SEQ ID NO: 723 | | | |
| FP169 | SEQ ID NO: 724 | SEQ ID NO: 727 | SEQ ID NO: 380 | SEQ ID NO: 698 |
| FP170 | SEQ ID NO: 253; | SEQ ID NO: 727 | SEQ ID NO: 380 | SEQ ID NO: 699 |
| | and | | | |
| | SEQ ID NO: 255 | | | |
| FP171 | SEQ ID NO: 722; | SEQ ID NO: 727 | SEQ ID NO: 380 | SEQ ID NO: 700 |
| | and | | | |
| | SEQ ID NO: 723 | | | |
| FP172 | SEQ ID NO: 721 | SEQ ID NO: 733 | SEQ ID NO: 380 | SEQ ID NO: 701 |
| FP173 | SEQ ID NO: 724 | SEQ ID NO: 733 | SEQ ID NO: 380 | SEQ ID NO: 702 |
| FP174 | SEQ ID NO: 253; | SEQ ID NO: 733 | SEQ ID NO: 380 | SEQ ID NO: 703 |
| | and | | | |
| | SEQ ID NO: 255 | | | |
| FP175 | SEQ ID NO: 722; | SEQ ID NO: 733 | SEQ ID NO: 380 | SEQ ID NO: 704 |
| | and | | | |
| | SEQ ID NO: 723 | | | |
| FP176 | SEQ ID NO: 721 | N/A | SEQ ID NO: 378 | SEQ ID NO: 705 |
| FP177 | SEQ ID NO: 253; | N/A | SEQ ID NO: 378 | SEQ ID NO: 706 |
| | and | | | |
| | SEQ ID NO: 255 | | | |
| FP178 | SEQ ID NO: 721 | N/A | SEQ ID NO: 380 | SEQ ID NO: 707 |
| FP179 | SEQ ID NO: 253; | N/A | SEQ ID NO: 380 | SEQ ID NO: 708 |
| | and | | | |
| | SEQ ID NO: 255 | | | |
| FP180 | SEQ ID NO: 253; | SEQ ID NO: 279 | SEQ ID NO: 378 | SEQ ID NO: 709 |
| | and | | | |
| | SEQ ID NO: 255 | | | |
| FP181 | SEQ ID NO: 253; | SEQ ID NO: 734 | SEQ ID NO: 378 | SEQ ID NO: 710 |
| | and | | | |
| | SEQ ID NO: 255 | | | |
| FP182 | SEQ ID NO: 253; | SEQ ID NO: 735 | SEQ ID NO: 378 | SEQ ID NO: 711 |
| | and | | | |
| | SEQ ID NO: 255 | | | |
| FP183 | SEQ ID NO: 253; | SEQ ID NO: 279 | SEQ ID NO: 380 | SEQ ID NO: 712 |
| | and | | | |
| | SEQ ID NO: 255 | | | |
| FP184 | SEQ ID NO: 253; | SEQ ID NO: 734 | SEQ ID NO: 380 | SEQ ID NO: 713 |
| | and | | | |
| | SEQ ID NO: 255 | | | |
| FP185 | SEQ ID NO: 253; | SEQ ID NO: 735 | SEQ ID NO: 380 | SEQ ID NO: 714 |
| | and | | | |
| | SEQ ID NO: 255 | | | |
| FP186 | SEQ ID NO: 253; | SEQ ID NO: 727 | SEQ ID NO: 374 | SEQ ID NO: 715 |
| | and | | | |
| | SEQ ID NO: 255 | | | |
| FP187 | SEQ ID NO: 253; | SEQ ID NO: 733 | SEQ ID NO: 374 | SEQ ID NO: 716 |
| | and | | | |
| | SEQ ID NO: 255 | | | |
| FP188 | SEQ ID NO: 253; | SEQ ID NO: 727 | SEQ ID NO: 376 | SEQ ID NO: 717 |
| | and | | | |
| | SEQ ID NO: 255 | | | |
| FP189 | SEQ ID NO: 253; | SEQ ID NO: 733 | SEQ ID NO: 376 | SEQ ID NO: 718 |
| | and | | | |
| | SEQ ID NO: 255 | | | |
| FP190 | SEQ ID NO: 253; | SEQ ID NO: 736 | SEQ ID NO: 378 | SEQ ID NO: 719 |
| | and | | | |
| | SEQ ID NO: 255 | | | |
| FP191 | SEQ ID NO: 253; | SEQ ID NO: 736 | SEQ ID NO: 380 | SEQ ID NO: 720 |
| | and | | | |
| | SEQ ID NO: 255 | | | |

[0120] In some embodiments, the molecule self-associates to form a dimer molecule. In some embodiments, the dimer molecule is a homodimer or a heterodimer. In some embodiments, a molecule, or a composition comprises a first polypeptide and a second polypeptide.

[0121] In some embodiments, a first polypeptide comprises an amino acid sequence having at least 50%, at least 70%, at least 75%, at least 80%, at least 85%, at least 90%, at least 91%, at least 92%, at least 93%, at least 94%, at least 95%, at least 96%, at least 97%, at least 98%, or at least 99%, or 100% sequence identity to any one sequence of SEQ ID NO: 380, 251, 5-243, 247, 280-379, 381-528, 737, 745-823, 828-864, or 885-916, wherein said amino acid sequence is conjugated to an Fc domain, such as those provided for herein, for example, in SEQ ID NO: 721, 724, or 725. In some embodiments, a first polypeptide comprises an amino acid sequence having at least 50%, at least 70%, at least 75%, at least 80%, at least 85%, at least 90%, at least 91%, at least 92%, at least 93%, at least 94%, at least 95%, at least 96%, at least 97%, at least 98%, or at least 99%, or 100% sequence identity to any one sequence of SEQ ID NO: 380, 251, 5-243, 247, 280-379, 381-528, 737, 745-823, 828-864, or 885-916, wherein said amino acid sequence is conjugated to an Fc domain comprising knob in hole mutations, such as those provided herein, for example, and without limitation, SEQ ID NO: 253, 254, 255, 256, 722, and/or 723. In some embodiments, a first polypeptide comprises an amino acid sequence of SEQ ID NO: 380, 251, 5-243, 247, 280-379, 381-528, 737, 745-823, 828-864, or 885-916, wherein said amino acid sequence is conjugated to an Fc domain, such as those provided for herein, for example, in SEQ ID NO: 721, 724, or 725. In some embodiments, a first polypeptide comprises an amino acid sequence of SEQ ID NO: 380, 251, 5-243, 247, 280-379, 381-528, 737, 745-823, 828-864, or 885-916, wherein said amino acid sequence is conjugated to an Fc domain comprising knob in hole mutations, such as those provided herein, for example, and without limitation, SEQ ID NO: 253, 254, 255, 256, 722, and/or 723. In some embodiments, a first polypeptide comprises an Fc domain, such as those provided for herein, for example, in SEQ ID NO: 721, 724, or 725. In some embodiments, a first polypeptide comprises an Fc domain comprising knob in hole mutations, such as those provided herein, for example, and without limitation, SEQ ID NO: 253, 254, 255, 256, 722, and/or 723.

[0122] In some embodiments, a second polypeptide comprises an amino acid sequence having at least 50%, at least 70%, at least 75%, at least 80%, at least 85%, at least 90%, at least 91%, at least 92%, at least 93%, at least 94%, at least 95%, at least 96%, at least 97%, at least 98%, or at least 99%, or 100% sequence identity to any one sequence of SEQ ID NO: 380, 251, 5-243, 247, 280-379, 381-528, 737, 745-823, 828-864, or 885-916, wherein said amino acid sequence is conjugated to an Fc domain, such as those provided for herein, for example, in SEQ ID NO: 721, 724, or 725. In some embodiments, a second polypeptide comprises an amino acid sequence having at least 50%, at least 70%, at least 75%, at least 80%, at least 85%, at least 90%, at least 91%, at least 92%, at least 93%, at least 94%, at least 95%, at least 96%, at least 97%, at least 98%, or at least 99%, or 100% sequence identity to any one sequence of SEQ ID NO: 380, 251, 5-243, 247, 280-379, 381-528, 737, 745-823, 828-864, or 885-916, wherein said amino acid sequence is conjugated to an Fc domain comprising knob in hole mutations, such as those provided herein, for example, and without limitation, SEQ ID NO: 253, 254, 255, 256, 722, and/or 723. In some embodiments, a second polypeptide comprises an amino acid sequence of SEQ ID NO: 380, 251, 5-243, 247, 280-379, 381-528, 737, 745-823, 828-864, or 885-916, wherein said amino acid sequence is conjugated to an Fc domain, such as those provided for herein, for example, in SEQ ID NO: 721, 724, or 725. In some embodiments, a second polypeptide comprises an amino acid sequence of SEQ ID NO: 380, 251, 5-243, 247, 280-379, 381-528, 737, 745-823, 828-864, or 885-916, wherein said amino acid sequence is conjugated to an Fc domain comprising knob in hole mutations, such as those provided herein, for example, and without limitation, SEQ ID NO: 253, 254, 255, 256, 722, and/or 723. In some embodiments, a second polypeptide comprises an Fc domain, such as those provided for herein, for example, in SEQ ID NO: 721, 724, or 725. In some embodiments, a second polypeptide comprises an Fc domain comprising knob in hole mutations, such as those provided herein, for example, and without limitation, SEQ ID NO: 253, 254, 255, 256, 722, and/or 723.

[0123] In some embodiments, a first polypeptide comprises an amino acid sequence having at least 50%, at least 70%, at least 75%, at least 80%, at least 85%, at least 90%, at least 91%, at least 92%, at least 93%, at least 94%, at least 95%, at least 96%, at least 97%, at least 98%, or at least 99%, or 100% sequence identity to any one sequence of SEQ ID NO: 257, 258, 259, 529-720.

[0124] In some embodiments, a second polypeptide comprises an amino acid sequence having at least 50%, at least 70%, at least 75%, at least 80%, at least 85%, at least 90%, at least 91%, at least 92%, at least 93%, at least 94%, at least 95%, at least 96%, at least 97%, at least 98%, or at least 99%, or 100% sequence identity to any one sequence of SEQ ID NO: 257, 258, 259, 529-720.

[0125] In some embodiments, a molecule, or a composition comprises first polypeptide comprising an amino acid sequence having at least 50%, at least 70%, at least 75%, at least 80%, at least 85%, at least 90%, at least 91%, at least 92%, at least 93%, at least 94%, at least 95%, at least 96%, at least 97%, at least 98%, or at least 99%, or 100% sequence identity to any one sequence of SEQ ID NO: 257, 258, 259, 529-720; and a second polypeptide comprising an Fc domain, such as those provided for herein.

[0126] In some embodiments, a molecule, or a composition comprises first polypeptide comprising an amino acid sequence having at least 50%, at least 70%, at least 75%, at least 80%, at least 85%, at least 90%, at least 91%, at least 92%, at least 93%, at least 94%, at least 95%, at least 96%, at least 97%, at least 98%, or at least 99%, or 100% sequence identity to any one sequence of SEQ ID NO: 257, 258, 259, 529-720; and a second polypeptide comprising an amino acid sequence having at least 50%, at least 70%, at least 75%, at least 80%, at least 85%, at least 90%, at least 91%, at least 92%, at least 93%, at least 94%, at least 95%, at least 96%, at least 97%, at least 98%, or at least 99%, or 100% sequence identity to any one sequence of SEQ ID NO: 257, 258, 259, 529-720.

[0127] In some embodiments, a molecule, or a composition comprises first polypeptide comprising an amino acid sequence of SEQ ID NO: 257, 258, 259, 529-720; and a second polypeptide comprising an Fc domain, such as those provided for herein

[0128] In some embodiments, a molecule, or a composition comprises first polypeptide comprising an Fc domain, such as those provided for herein; and a second polypeptide comprising an amino acid sequence of SEQ ID NO: 257, 258, 259, 529-720.

[0129] In some embodiments, a molecule, or a composition comprises first polypeptide comprising an amino acid sequence of SEQ ID NO: 257, 258, 259, 529-720; and a second polypeptide comprising an amino acid sequence of SEQ ID NO: 257, 258, 259, 529-720.

[0130] In some embodiments, the polypeptide having protease activity is a polypeptide having IgE protease activity which binds to IgE. In some embodiments, the polypeptide having IgE protease activity binds to amino acids of an epitope of IgE. The epitopes are described herein.

[0131] In some embodiments, polypeptides having IgE protease activity, such as those provided herein, bind to an epitope on IgE. IgE has the amino acid sequence as set forth in SEQ ID NO: 246:

(SEQ ID NO: 246)
ASTQSPSVFPLTRCCKNIPSNATSVTLGCLATGYFPEPVMVTWDTG
SLNGTTMTLPATTLTLSGHYATISLLTVSGAWAKQMFTCRVAHTPS
STDWVDNKTFSVCSRDFTPPTVKILQSSCDGGGHFPPTIQLLCLVS
GYTPGTINITWLEDGQVMDVDLSTASTTQEGELASTQSELTLSQKH
WLSDRTYTCQVTYQGHTFEDSTKKCADSNPRGVSAYLSRPSPFDLF
IRKSPTITCLVVDLAPSKGTVNLTWSRASGKPVNHSTRKEEKQRNG
TLTVTSTLPVGTRDWIEGETYQCRVTHPHLPRALMRSTTKTSGPRA
APEVYAFATPEWPGSRDKRTLACLIQNFMPEDISVQWLHNEVQLPD
ARHSTTQPRKTKGSGFFVFSRLEVTRAEWEQKDEFICRAVHEAASP
SQTVQRAVSVNPGLAGGSAQSQRAPDRVLCHSGQQQGLPRAAGGSV
PHPRCHCGAGRADWPGPPELDVCVEEAEGEAPWTWTGLCIFAALFL
LSVSYSAAITLLMVQRFLSATRQGRPQTSLDYTNVLQPHA.

[0132] In some embodiments, polypeptides having IgE protease activity, such as those provided herein, bind to an epitope on IgE. In some embodiments, polypeptides having IgE protease activity, such as those provided herein, bind to an epitope on IgE that include IgE (SEQ ID NO: 246) residues S332, N333, P334, R335, G336, V337, S338, A339, D363, L364, A365, P366, K368, A378, K392, R394, N395, G396, T397, R420, H423, P424, H425, L426, P427, R428, A429, M431, R432, S433, or any combination thereof. In some embodiments, the epitope includes residues D363, A365, P366, K368, K392, R394, N395, G396, T397, and H425 of IgE. In some embodiments, the epitope includes residues S332, N333, P334, R335, G336, V337, S338, A339, D363, L364, A365, K368, A378, R420, H423, P424, H425, L426, P427, R428, A429, M431, R432, and S433 of IgE.

[0133] In some embodiments, polypeptides having IgE protease activity, such as those provided herein, bind to an epitope on IgE, wherein the IgE is a non-cleaved Fc. In some embodiments, polypeptides having IgE protease activity, such as those provided herein, bind to an epitope on IgE, wherein the IgE is a cleaved Fc. In some embodiments, the non-cleaved Fc epitope includes residues D363, A365, P366, K368, K392, R394, N395, G396, T397, and H425 of IgE. In some embodiments, the cleaved Fc epitope includes residues S332, N333, P334, R335, G336, V337, S338, A339, D363, L364, A365, K368, A378, R420, H423, P424, H425, L426, P427, R428, A429, M431, R432, and S433 of IgE.

[0134] In some embodiments, polypeptides having protease activity described herein are as effective, or more effective at cleaving IgE than the parental protease. In some embodiments, polypeptides having protease activity described herein are as effective, or more effective at cleaving IgE than the parental protease of SEQ ID NO: 1, 2, 3, 4, or 91. In some embodiments, polypeptides having protease activity described herein are more selective for cleaving IgE than the parental protease of SEQ ID NO: 1, 2, 3, 4, or 91.

[0135] In some embodiments, PRT-1 through PRT-493 is as effective, or more effective at cleaving IgE than the parental protease. In some embodiments, PRT-1 through PRT-493 is as effective at cleaving IgE as the parental protease. In some embodiments, PRT-1 through PRT-493 is as effective, or more effective at cleaving IgE than the parental protease of SEQ ID NO: 1, 2, 3, 4, or 91. In some embodiments, PRT-1 through PRT-493 is as effective at cleaving IgE as the parental protease of SEQ ID NO: 1, 2, 3, 4, or 91.

[0136] In some embodiments, FP-1 through FP-191 is as effective, or more effective at cleaving IgE than the parental protease. In some embodiments, FP-1 through FP-191 is as effective at cleaving IgE as the parental protease. In some embodiments, FP-1 through FP-191 is as effective, or more effective at cleaving IgE than the parental protease of SEQ ID NO: 1, 2, 3, or 4. In some embodiments, FP-1 through FP-191 is as effective at cleaving IgE as the parental protease of SEQ ID NO: 1, 2, 3, or 4.

[0137] In some embodiments, the polypeptide, such as those provided for herein, is more effective or more selective at cleaving IgE than the polypeptide of SEQ ID NO: 1, 3, or 91 and is more selective for cleaving IgE than IgG.

[0138] In the context of nucleotide sequence, such as those encoding for the domains, the term “substantially identical” is used herein to refer to a first nucleic acid sequence that contains a sufficient or minimum number of nucleotides that are identical to aligned nucleotides in a second nucleic acid sequence such that the first and second nucleotide sequences encode a polypeptide having common functional activity, or encode a common structural polypeptide domain or a common functional polypeptide activity. For example, nucleotide sequences having at least about 85%, 90%, 91%, 92%, 93%, 94%, 95%, 96%, 97%, 98% or 99% identity to a reference sequence, e.g., an amino acid sequence provided herein.

[0139] The term “functional variant” refers to polypeptides that have a substantially identical amino acid sequence to the naturally-occurring sequence, or are encoded by a substantially identical nucleotide sequence, and are capable of having one or more activities of the naturally-occurring sequence. For example, a Fc variant can have the amino acid sequence of a Fc polypeptide but comprise a mutation that prevents or disrupts cleavage by a protease.

[0140] Calculations of homology or sequence identity between sequences (the terms are used interchangeably herein) can be performed as follows.

[0141] To determine the percent identity of two amino acid sequences, or of two nucleic acid sequences, the amino acid sequences are aligned for optimal comparison purposes (e.g., gaps can be introduced in one or both of a first and a second amino acid or nucleic acid sequence for optimal alignment and non-homologous sequences can be disregarded for comparison purposes). In a preferred embodiment, the length of a reference sequence aligned for comparison purposes is at least 30%, preferably at least 40%, more preferably at least 50%, 60%, and even more preferably at least 70%, 80%, 90%, 100% of the length of the reference sequence. The amino acid residues or nucleotides at corresponding amino acid positions or nucleotide positions are then compared. When a position in the first sequence is occupied by the same amino acid residue or nucleotide as the corresponding position in the second sequence, then the molecules are identical at that position (as used herein amino acid or nucleic acid “identity” is equivalent to amino acid or nucleic acid “homology”).

[0142] The percent identity between the two sequences is a function of the number of identical positions shared by the amino acid sequences, taking into account the number of gaps, and the length of each gap, which need to be introduced for optimal alignment of the two sequences.

[0143] The comparison of sequences and determination of percent identity between two sequences can be accomplished using a mathematical algorithm. In a preferred embodiment, the percent identity between two amino acid sequences is determined using the Needleman and Wunsch ((1970) J. Mol. Biol. 48:444-453) algorithm which has been incorporated into the GAP program in the GCG software package (available at http://www.gcg.com), using either a Blossum 62 matrix or a PAM250 matrix, and a gap weight of 16, 14, 12, 10, 8, 6, or 4 and a length weight of 1, 2, 3, 4, 5, or 6. In yet another preferred embodiment, the percent identity between two nucleotide sequences is determined using the GAP program in the GCG software package (available at http://www.gcg.com), using a NWSgapdna.CMP matrix and a gap weight of 40, 50, 60, 70, or 80 and a length weight of 1, 2, 3, 4, 5, or 6. A particularly preferred set of parameters (and the one that should be used unless otherwise specified) are a Blossum 62 scoring matrix with a gap penalty of 12, a gap extend penalty of 4, and a frameshift gap penalty of 5.

[0144] The percent identity between two amino acid or nucleotide sequences can be determined using the algorithm of E. Meyers and W. Miller ((1989) CABIOS, 4:11-17) which has been incorporated into the ALIGN program (version 2.0), using a PAM120 weight residue table, a gap length penalty of 12 and a gap penalty of 4.

[0145] The nucleic acid and protein sequences described herein can be used as a “query sequence” to perform a search against public databases to, for example, identify other family members or related sequences. Such searches can be performed using the NBLAST and XBLAST programs (version 2.0) of Altschul, et al. (1990) J. Mol. Biol. 215:403-10. BLAST nucleotide searches can be performed with the NBLAST program, score=100, wordlength=12 to obtain nucleotide sequences homologous to for example any a nucleic acid sequence provided herein. BLAST protein searches can be performed with the XBLAST program, score=50, wordlength=3 to obtain amino acid sequences homologous to protein molecules provided herein. To obtain gapped alignments for comparison purposes, Gapped BLAST can be utilized as described in Altschul et al., (1997) Nucleic Acids Res. 25:3389-3402. When utilizing BLAST and Gapped BLAST programs, the default parameters of the respective programs (e.g., XBLAST and NBLAST) can be used. See http://www.ncbi.nlm.nih.gov.

[0146] As used herein, the term “hybridizes under low stringency, medium stringency, high stringency, or very high stringency conditions” describes conditions for hybridization and washing. Guidance for performing hybridization reactions can be found in Current Protocols in Molecular Biology, John Wiley & Sons, N.Y. (1989), 6.3.1-6.3.6, which is incorporated by reference. Aqueous and nonaqueous methods are described in that reference and either can be used. Specific hybridization conditions referred to herein are as follows: 1) low stringency hybridization conditions in 6× sodium chloride/sodium citrate (SSC) at about 45° C., followed by two washes in 0.2×SSC, 0.1% SDS at least at 50° C. (the temperature of the washes can be increased to 55° C. for low stringency conditions); 2) medium stringency hybridization conditions in 6×SSC at about 45° C., followed by one or more washes in 0.2×SSC, 0.1% SDS at 60° C.; 3) high stringency hybridization conditions in 6×SSC at about 45° C., followed by one or more washes in 0.2×SSC, 0.1% SDS at 65° C.; and preferably 4) very high stringency hybridization conditions are 0.5M sodium phosphate, 7% SDS at 65° C., followed by one or more washes at 0.2×SSC, 1% SDS at 65° C. Very high stringency conditions (4) are the preferred conditions and the ones that should be used unless otherwise specified.

[0147] It is understood that the molecules of the present embodiments may have additional conservative or non-essential amino acid substitutions, which do not have a substantial effect on their functions.

[0148] The term “amino acid” is intended to embrace all molecules, whether natural or synthetic, which include both an amino functionality and an acid functionality and capable of being included in a polymer of naturally-occurring amino acids. Exemplary amino acids include naturally-occurring amino acids; analogs, derivatives and congeners thereof; amino acid analogs having variant side chains; and all stereoisomers of any of any of the foregoing. As used herein the term “amino acid” includes both the D- or L-optical isomers and peptidomimetics.

[0149] A “conservative amino acid substitution” is one in which the amino acid residue is replaced with an amino acid residue having a similar side chain. Families of amino acid residues having similar side chains have been defined in the art. These families include amino acids with basic side chains (e.g., lysine, arginine, histidine), acidic side chains (e.g., aspartic acid, glutamic acid), uncharged polar side chains (e.g., glycine, asparagine, glutamine, serine, threonine, tyrosine, cysteine), nonpolar side chains (e.g., alanine, valine, leucine, isoleucine, proline, phenylalanine, methionine, tryptophan), beta-branched side chains (e.g., threonine, valine, isoleucine) and aromatic side chains (e.g., tyrosine, phenylalanine, tryptophan, histidine).

[0150] The molecules and polypeptides provided for herein can be used to treat diseases and conditions mediated by IgE. Thus, embodiments are provided for methods of treating an IgE mediated disease or disorder in a subject. In some embodiments, the IgE mediated disease or disorder is an autoimmune disease or disorder. In some embodiments, the methods comprise administering to the subject a polypeptide, molecule, compound, or compositions as provided for herein. In some embodiments, the subject has or is at risk of having an IgE mediated disease or disorder. In some embodiments, the subject has or is at risk of having an autoimmune disease or disorder.

[0151] Antibody-mediated rejection (AMR) causes severe and rapid dysfunction and loss of allografts. Without wishing to be bound to a particular theory, the most common mechanism underlying AMR is an anamnestic response that originates from previous antigenic exposure. These donor specific antibody (DSA) responses are usually robust and result in the rapid production of high levels of DSA and acute allograft dysfunction. The mechanism of injury in AMR involves antigens that initiate the production of DSAs resulting in antigen-antibody interactions, complement activation and inflammation, and the resultant donor tissue damage. The impact of AMR on graft survival is dramatic and continues long after the initial inflammatory condition has resolved as was recently demonstrated in a study by LeFaucheur and Glotz. In this single center study of a large cohort of sensitized recipients, the investigators compared allograft survival for recipients successfully treated for AMR versus those that never experienced AMR. In some embodiments, the molecules and polypeptides provided for herein can be used to treat AMR.

[0152] In some embodiments, methods of treating a disease or disorder in a subject are provided. In some embodiments, the disease or disorder is an Ig mediated disease or disorder. In some embodiments, the disease or disorder is an autoimmune disease or disorder.

[0153] In some embodiments, methods of decreasing circulating immunoglobulins in a subject are provided. In some embodiments, the circulating immunoglobulins are selected from IgG (such as IgG1, IgG2, IgG3, IgG4), IgA, IgM, IgE, or IgD. In some embodiments, methods of decreasing circulating IgG immunoglobulins are provided. In some embodiments, methods of decreasing circulating IgG1 immunoglobulins are provided. In some embodiments, methods of decreasing circulating IgG2 immunoglobulins are provided. In some embodiments, methods of decreasing circulating IgG3 immunoglobulins are provided. In some embodiments, methods of decreasing circulating IgG4 immunoglobulins are provided. In some embodiments, methods of decreasing circulating IgA immunoglobulins are provided. In some embodiments, methods of decreasing circulating IgM immunoglobulins are provided. In some embodiments, methods of decreasing circulating IgE immunoglobulins are provided. In some embodiments, methods of decreasing circulating IgD immunoglobulins are provided. In some embodiments, methods of decreasing circulating immunoglobulins in a subject are provided, wherein the subject is a subject with an autoimmune disease or disorder.

[0154] In some embodiments, a method of reducing immunoglobulins is provided. In some embodiments, a method of reducing immunoglobulins, such as IgE, in a subject, is provided. In some embodiments, the method of reducing immunoglobulins, such as IgE, in a subject, comprises administering to the subject any one of the polypeptides or compositions provided for herein. In some embodiments, the method of reducing immunoglobulins, such as IgE, in a subject, comprises administering to the subject the polypeptide comprising the amino acid sequence of any one of SEQ ID NO: 380, 251, 5-243, 247, 280-379, 381-528, 737, 745-823, 828-864, or 885-916, or the composition thereof. In some embodiments, the method of reducing immunoglobulins, such as IgE, in a subject, comprises administering to the subject a molecule, or a composition comprising a first polypeptide and a second polypeptide, such as those provided herein, or the composition thereof. In some embodiments, the reduction of immunoglobulins may be about 5%, about 10%, about 15%, about 20%, about 25%, about 30%, about 35%, about 40%, about 45%, about 50%, about 55%, about 60%, about 65%, about 70%, about 75%, about 80%, about 85%, about 90%, about 95%, or about 100% reduction. In some embodiments, the reduction of immunoglobulins may be at least 5%, at least 10%, at least 15%, at least 20%, at least 25%, at least 30%, at least 35%, at least 40%, at least 45%, at least 50%, at least 55%, at least 60%, at least 65%, at least 70%, at least 75%, at least 80%, at least 85%, at least 90%, or at least 95% reduction. In some embodiments, the reduction of immunoglobulins may be a 5%, 10%, 15%, 20%, 25%, 30%, 35%, 40%, 45%, 50%, 55%, 60%, 65%, 70%, 75%, 80%, 85%, 90%, 95%, or 100% reduction.

[0155] In some embodiments, a method of treating a disease or disorder in a subject is provided. In some embodiments, the method of treating a disease or disorder in a subject, comprises administering to the subject any one of the polypeptides or compositions provided for herein. In some embodiments, the method of treating a disease or disorder in a subject comprises administering to the subject the polypeptide comprising the amino acid sequence of any one of SEQ ID NO: 380, 251, 5-243, 247, 280-379, 381-528, 737, 745-823, 828-864, or 885-916, or the composition thereof. In some embodiments, the method of treating a disease or disorder in a subject comprises administering to the subject a molecule, or a composition comprising a first polypeptide and a second polypeptide, such as those provided herein, or the composition thereof.

[0156] In some embodiments, a method of improving a gene-therapy in subject is provided. In some embodiments, the method of improving a gene-therapy in subject comprises administering to the subject any one of the polypeptides or compositions provided for herein. In some embodiments, the method of improving a gene-therapy in subject comprises administering to the subject the polypeptide comprising the amino acid sequence of any one of SEQ ID NO: 380, 251, 5-243, 247, 280-379, 381-528, 737, 745-823, 828-864, or 885-916, or the composition thereof. In some embodiments, the method of improving a gene-therapy in subject comprises administering to the subject a molecule, or a composition comprising a first polypeptide and a second polypeptide, such as those provided herein, or the composition thereof.

[0157] In some embodiments, a method of treating a subject having, or at risk, or elevated risk, for having, an IgE mediated disease or disorder is provided. In some embodiments, the method of treating a subject having, or at risk, or elevated risk, for having, an IgE mediated disease or disorder comprises administering to the subject any one of the polypeptides or compositions provided for herein. In some embodiments, the method of treating a subject having, or at risk, or elevated risk, for having, an IgE mediated disease or disorder comprises administering to the subject the polypeptide comprising the amino acid sequence of any one of SEQ ID NO: 380, 251, 5-243, 247, 280-379, 381-528, 737, 745-823, 828-864, or 885-916, or the composition thereof. In some embodiments, the method of treating a subject having, or at risk, or elevated risk, for having, an IgE mediated disease or disorder comprises administering to the subject a molecule, or a composition comprising a first polypeptide and a second polypeptide, such as those provided herein, or the composition thereof.

[0158] Non-limiting examples of diseases and disorders, such as autoimmune diseases or disorders, that can be treated with the molecules and polypeptides described herein include, but are not limited to, chronic spontaneous urticaria (CSU), atopic dermatitis, eczema, angioedema, autoimmune bullous skin diseases, bullous pemphigoid (BP), graft vs. host disease (GVHD), sarcoidosis, hypersensitivity pneumonitis, chronic obstructive pulmonary disease (COPD), asthma, allergic asthma, allergic bronchopulmonary mycosis (ABPM), allergic bronchopulmonary aspergillosis (ABPA), chronic rhinosinusitis with nasal polyps (CRSwNP), chronic rhinosinusitis without nasal polyps (CRSsNP), allergic rhinitis, allergic conjunctivitis, vernal keratoconjunctivitis, food allergies, alpha galactosidase syndrome, pollen-food allergy syndrome/oral allergy syndrome (OAS), acute allergen exposure, human seminal fluid hypersensitivity, anaphylaxis, hypersensitivity, allergy, latex allergy, occupational exposure to skin mucosa and lung sensitizing agents and allergens, mastocytosis, mast cell activation disorders, prevention of drug-induced immediate hypersensitivity, drug desensitization (e.g., chemotherapy), allergen immunotherapy desensitization, eosinophilic granulomatosis with polyangiitis (EGPA)/Churg-Strauss, hyper-IgE syndrome (HIES), and the like.

[0159] In some embodiments, methods comprise administering a therapeutically effective amount of any one of the polypeptides provided herein, or the pharmaceutical composition comprising any one polypeptide provided herein, thereby treating the subject.

### Pharmaceutical Compositions and Kits

[0160] In some embodiments, the present embodiments provide compositions, e.g., pharmaceutically acceptable compositions, which include a therapeutic compound described herein, formulated together with a pharmaceutically acceptable carrier. As used herein, “pharmaceutically acceptable carrier” includes any and all solvents, dispersion media, isotonic and absorption delaying agents, and the like that are physiologically compatible. The carrier can be suitable for intravenous, intramuscular, subcutaneous, parenteral, rectal, local, ophthalmic, topical, spinal or epidermal administration (e.g. by injection or infusion). As used herein, the term “carrier” means a diluent, adjuvant, or excipient with which a compound is administered. In some embodiments, pharmaceutical carriers can also be liquids, such as water and oils, including those of petroleum, animal, vegetable or synthetic origin, such as peanut oil, soybean oil, mineral oil, sesame oil and the like. The pharmaceutical carriers can also be saline, gum acacia, gelatin, starch paste, talc, keratin, colloidal silica, urea, and the like. In addition, auxiliary, stabilizing, thickening, lubricating and coloring agents can be used. The carriers can be used in pharmaceutical compositions comprising the therapeutic compounds provided for herein.

[0161] The compositions and compounds of the embodiments provided for herein may be in a variety of forms. These include, for example, liquid, semi-solid and solid dosage forms, such as liquid solutions (e.g., injectable and infusible solutions), dispersions or suspensions, liposomes and suppositories. The preferred form depends on the intended mode of administration and therapeutic application. Typical compositions are in the form of injectable or infusible solutions. In some embodiments, the mode of administration is parenteral (e.g., intravenous, subcutaneous, intraperitoneal, intramuscular). In some embodiments, the therapeutic molecule is administered by intravenous infusion or injection. In another embodiment, the therapeutic molecule is administered by intramuscular or subcutaneous injection. In another embodiment, the therapeutic molecule is administered locally, e.g., by injection, or topical application, to a target site.

[0162] The phrases “parenteral administration” and “administered parenterally” as used herein means modes of administration other than enteral and topical administration, usually by injection, and includes, without limitation, intravenous, intramuscular, intraarterial, intrathecal, intracapsular, intraorbital, intracardiac, intradermal, intraperitoneal, transtracheal, subcutaneous, subcuticular, intraarticular, subcapsular, subarachnoid, intraspinal, epidural and intrasternal injection and infusion.

[0163] The compositions typically should be sterile and stable under the conditions of manufacture and storage. The composition can be formulated as a solution, microemulsion, dispersion, liposome, or other ordered structure suitable to high therapeutic molecule concentration. Sterile injectable solutions can be prepared by incorporating the active compound (i.e., therapeutic molecule) in the required amount in an appropriate solvent with one or a combination of ingredients enumerated above, as required, followed by filtered sterilization. Generally, dispersions are prepared by incorporating the active compound into a sterile vehicle that contains a basic dispersion medium and the required other ingredients from those enumerated above. In the case of sterile powders for the preparation of sterile injectable solutions, the preferred methods of preparation are vacuum drying and freeze-drying that yields a powder of the active ingredient plus any additional desired ingredient from a previously sterile-filtered solution thereof. The proper fluidity of a solution can be maintained, for example, by the use of a coating such as lecithin, by the maintenance of the required particle size in the case of dispersion and by the use of surfactants. Prolonged absorption of injectable compositions can be brought about by including in the composition an agent that delays absorption, for example, monostearate salts and gelatin.

[0164] As will be appreciated by the skilled artisan, the route and/or mode of administration will vary depending upon the desired results. In certain embodiments, the active compound may be prepared with a carrier that will protect the compound against rapid release, such as a controlled release formulation, including implants, transdermal patches, and microencapsulated delivery systems. Biodegradable, biocompatible polymers can be used, such as ethylene vinyl acetate, polyanhydrides, polyglycolic acid, collagen, polyorthoesters, and polylactic acid. Many methods for the preparation of such formulations are patented or generally known to those skilled in the art. See, e.g., Sustained and Controlled Release Drug Delivery Systems, J. R. Robinson, ed., Marcel Dekker, Inc., New York, 1978.

[0165] In certain embodiments, a therapeutic compound can be orally administered, for example, with an inert diluent or an assimilable edible carrier. The compound (and other ingredients, if desired) may also be enclosed in a hard or soft shell gelatin capsule, compressed into tablets, or incorporated directly into the subject's diet. For oral therapeutic administration, the compounds may be incorporated with excipients and used in the form of ingestible tablets, buccal tablets, troches, capsules, elixirs, suspensions, syrups, wafers, and the like. To administer a compound by other than parenteral administration, it may be necessary to coat the compound with, or co-administer the compound with, a material to prevent its inactivation. Therapeutic compositions can also be administered with medical devices known in the art.

[0166] Dosage regimens are adjusted to provide the optimum desired response (e.g., a therapeutic response). For example, a single bolus may be administered, several divided doses may be administered over time or the dose may be proportionally reduced or increased as indicated by the exigencies of the therapeutic situation. It is especially advantageous to formulate parenteral compositions in dosage unit form for ease of administration and uniformity of dosage. Dosage unit form as used herein refers to physically discrete units suited as unitary dosages for the subjects to be treated; each unit contains a predetermined quantity of active compound calculated to produce the desired therapeutic effect in association with the required pharmaceutical carrier. The specification for the dosage unit forms are dictated by and directly dependent on (a) the unique characteristics of the active compound and the particular therapeutic effect to be achieved, and (b) the limitations inherent in the art of compounding such an active compound for the treatment of sensitivity in individuals.

[0167] An exemplary, non-limiting range for a therapeutically or prophylactically effective amount of a therapeutic compound is 0.1-30 mg/kg, more preferably 1-25 mg/kg. Dosages and therapeutic regimens of the therapeutic compound can be determined by a skilled artisan. In certain embodiments, the therapeutic compound is administered by injection (e.g., subcutaneously or intravenously) at a dose of about 1 to 40 mg/kg, e.g., 1 to 30 mg/kg, e.g., about 5 to 25 mg/kg, about 10 to 20 mg/kg, about 1 to 5 mg/kg, 1 to 10 mg/kg, 5 to 15 mg/kg, 10 to 20 mg/kg, 15 to 25 mg/kg, or about 3 mg/kg. The dosing schedule can vary from e.g., once a week to once every 2, 3, or 4 weeks. In one embodiment, the therapeutic compound is administered at a dose from about 10 to 20 mg/kg every other week. The therapeutic compound can be administered by intravenous infusion at a rate of more than 20 mg/min, e.g., 20-40 mg/min, and typically greater than or equal to 40 mg/min to reach a dose of about 35 to 440 mg/m², typically about 70 to 310 mg/m², and more typically, about 110 to 130 mg/m². In embodiments, the infusion rate of about 110 to 130 mg/m² achieves a level of about 3 mg/kg. In other embodiments, the therapeutic compound can be administered by intravenous infusion at a rate of less than 10 mg/min, e.g., less than or equal to 5 mg/min to reach a dose of about 1 to 100 mg/m², e.g., about 5 to 50 mg/m², about 7 to 25 mg/m², or, about 10 mg/m². In some embodiments, the therapeutic compound is infused over a period of about 30 min. It is to be noted that dosage values may vary with the type and severity of the condition to be alleviated. It is to be further understood that for any particular subject, specific dosage regimens should be adjusted over time according to the individual need and the professional judgment of the person administering or supervising the administration of the compositions, and that dosage ranges set forth herein are exemplary only and are not intended to limit the scope or practice of the claimed composition.

[0168] The pharmaceutical compositions may include a “therapeutically effective amount” or a “prophylactically effective amount” of a therapeutic molecule. A “therapeutically effective amount” refers to an amount effective, at dosages and for periods of time necessary, to achieve the desired therapeutic result. A therapeutically effective amount of a therapeutic molecule may vary according to factors such as the disease state, age, sex, and weight of the individual, and the ability of the therapeutic compound to elicit a desired response in the individual. A therapeutically effective amount is also one in which any toxic or detrimental effects of a therapeutic molecule is outweighed by the therapeutically beneficial effects. A “therapeutically effective dosage” preferably inhibits a measurable parameter, e.g., immune attack at least about 20%, more preferably by at least about 40%, even more preferably by at least about 60%, and still more preferably by at least about 80% relative to untreated subjects. The ability of a compound to inhibit a measurable parameter, e.g., immune attack, can be evaluated in an animal model system predictive of efficacy in transplant rejection or autoimmune disorders. Alternatively, this property of a composition can be evaluated by examining the ability of the compound to inhibit, such inhibition in vitro by assays known to the skilled practitioner.

[0169] A “prophylactically effective amount” refers to an amount effective, at dosages and for periods of time necessary, to achieve the desired prophylactic result. Typically, since a prophylactic dose is used in subjects prior to or at an earlier stage of disease, the prophylactically effective amount will be less than the therapeutically effective amount.

[0170] In some embodiments, the polypeptide having IgE protease activity, such as those provided herein, may be administered to a subject. In some embodiments, the polypeptide having IgE protease activity, such as those provided herein, may be administered to a subject in need thereof. In some embodiments, the polypeptide having IgE protease activity, such as those provided herein, may be administered more than once (e.g., two times, three times, four times, five times, or more). In some embodiments, the polypeptide having IgE protease activity, such as those provided herein, may be administered at least once, at least twice, at least three time, at least four times, or more. In some embodiments, the polypeptide having IgE protease activity, such as those provided herein, may be administered to a subject without inducing an immune response from the subject. In some embodiments, the polypeptide having IgE protease activity, such as those provided herein, does not induce an immune response from a subject after administration to the subject. In some embodiments, the polypeptide having IgE protease activity, such as those provided herein, may be administered to a subject more than once without inducing an immune response from the subject.

[0171] Also within the scope of the embodiments is a kit comprising a therapeutic compound described herein. The kit can include one or more other elements including: instructions for use; other reagents, e.g., a label, a therapeutic agent, or an agent useful for chelating, or otherwise coupling, a therapeutic molecule to a label or other therapeutic agent, or a radioprotective composition; devices or other materials for preparing the a therapeutic molecule for administration; pharmaceutically acceptable carriers; and devices or other materials for administration to a subject.

[0172] In some embodiments, polypeptides having protease activity provided for herein may be conjugated to at least one, or more polypeptides. In some embodiments, the at least one, or more polypeptides, are the same as the polypeptides having protease activity provided for herein. In some embodiments, the at least one, or more polypeptides are an Fc domain. In some embodiments, the Fc domain comprises mutations that render the Fc domain effectorless. In some embodiments, the Fc domain comprises half-life extending mutations.

[0173] In some embodiments, the mutation in the Fc domain, which is according to the known numbering system, are selected from the group consisting of: L234A, L235A, L234F, L235E, P329G, P331S, N297A, N297G, N297Q, G236A, A330S, S239D, 1332E, S267E, H268F, S324T, Y296W, T299A, V308P, H310A, R409K, Y435H, T307A, T309A, T309K, K322A, K326W, K334W, K326A, K334A, G237A, P238S, H268A, M252Y, S254T, T256E, M428L, N434A, E380A, T250Q, or any combination thereof. In some embodiments, the Fc comprises a mutation at L234 and/or L235 and/or G237. In some embodiments, the Fc comprises L234A and/or L235A mutations, which can be referred to as “LALA” mutations. In some embodiments, the Fc comprises L234A, L235A, and G237A mutations, which can be referred to as “LALAGA” or “AAA”. In some embodiments, the Fc comprises L234F, and L235E mutations, which can be referred to as “LAFE” mutations. In some embodiments, the Fc comprises L234A, L235A, and P329G mutations, which can be referred to as “LALAPG” mutations. In some embodiments, the Fc comprises L234A, L235A, P329G, and P331S mutations, which can be referred to as “LALAPGS” mutations. In some embodiments, the Fc comprises L234A, L235A, and P329S mutations, which can be referred to as “LALAPS” mutations. In some embodiments, the Fc comprises a N297A mutation. In some embodiments, the Fc mutations comprises a N297G mutation. In some embodiments, the Fc comprises a N297Q mutation. In some embodiments, the Fc comprises a P329G mutation. In some embodiments, the Fc comprises G236A, A330S, and P331S mutations, which can be referred to as “GASDALIE” mutations. In some embodiments, the Fc comprises S239D and 1332E mutations, which can be referred to as “SIE” mutations. In some embodiments, the Fc comprises S267E, H268F, S324T, and I332E mutations, which can be referred to as “SEHE_STIE” mutations. In some embodiments, the Fc comprises Y296W, T299A, and V308P mutations, which can be referred to as “YTEV” mutations. In some embodiments, the Fc comprises H310A, R409K, and Y435H mutations, which can be referred to as “HRY” mutations. In some embodiments, the Fc comprises T307A and T309A mutations, which can be referred to as “TATA” mutations. In some embodiments, the Fc comprises T307A and T309K mutations, which can be referred to as “TAKA” mutations. In some embodiments, the Fc comprises a K322A mutation. In some embodiments, the Fc comprises K326W and K334W mutations, which can be referred to as “WKWK” mutations. In some embodiments, the Fc comprises K326A and K334A mutations, which can be referred to as “AA” mutations. In some embodiments, the Fc comprises L234A, L235A, G237A, P238S, H268A, A330S, and P331S mutations. In some embodiments, the Fc comprises T307A, E380A, and N434A mutations, which can be referred to as “AAA” mutations. In some embodiments, the Fc comprises T250Q, and M428L mutations, which can be referred to as “QL” mutations. In some embodiments, the Fc comprises M428L, and N434S mutations, which can be referred to as “LS” mutations. In some embodiments, the Fc comprises M252Y, S254T, and T256E mutations, which can be referred to as “YTE” mutations.

[0174] In some embodiments, the Fc comprises a H310A mutation. In some embodiments, the Fc comprises a H435A mutation. In some embodiments, the Fc comprises H310A and H435A mutations. In some embodiments, the Fc mutations comprise L234A, L235A, and H310A. In some embodiments, the Fc mutations comprise L234F, L235E, and H310A. In some embodiments, the Fc mutations comprise L234A, L235A, P329G, and H310A. In some embodiments, the Fc mutations comprise L234A, L235A, P329G, P331S, and H310A. In some embodiments, the Fc mutations comprise L234A, L235A, P329S, and H310A. In some embodiments, the Fc mutations comprise N297A, and H310A. In some embodiments, the Fc mutations comprise N297G, and H310A. In some embodiments, the Fc mutations comprise N297Q, and H310A. In some embodiments, the Fc mutations comprise P329G, and H310A. In some embodiments, the Fc mutations comprise G236A, A330S, P331S, and H310A. In some embodiments, the Fc mutations comprise S239D, 1332E, and H310A. In some embodiments, the Fc mutations comprise S267E, H268F, S324T, 1332E, and H310A. In some embodiments, the Fc mutations comprise Y296W, T299A, V308P, and H310A. In some embodiments, the Fc mutations comprise H310A, R409K, Y435H, and H310A. In some embodiments, the Fc mutations comprise T307A, T309A, and H310A. In some embodiments, the Fc mutations comprise T307A, T309K, and H310A. In some embodiments, the Fc mutations comprise K322A, and H310A. In some embodiments, the Fc mutations comprise K326W, K334W, and H310A. In some embodiments, the Fc mutations comprise K326A, K334A, and H310A. In some embodiments, the Fc mutations comprise L234A, L235A, and H435A. In some embodiments, the Fc mutations comprise L234F, L235E, and H435A. In some embodiments, the Fc mutations comprise L234A, L235A, P329G, and H435A. In some embodiments, the Fc mutations comprise L234A, L235A, P329G, P331S, and H435A. In some embodiments, the Fc mutations comprise L234A, L235A, P329S, and H435A. In some embodiments, the Fc mutations comprise N297A, and H435A. In some embodiments, the Fc mutations comprise N297G, and H435A. In some embodiments, the Fc mutations comprise N297Q, and H435A. In some embodiments, the Fc mutations comprise P329G, and H435A. In some embodiments, the Fc mutations comprise G236A, A330S, P331S, and H435A. In some embodiments, the Fc mutations comprise S239D, I332E, and H435A. In some embodiments, the Fc mutations comprise S267E, H268F, S324T, I332E, and H435A. In some embodiments, the Fc mutations comprise Y296W, T299A, V308P, and H435A. In some embodiments, the Fc mutations comprise H435A, R409K, Y435H, and H435A. In some embodiments, the Fc mutations comprise T307A, T309A, and H435A. In some embodiments, the Fc mutations comprise T307A, T309K, and H435A. In some embodiments, the Fc mutations comprise K322A, and H435A. In some embodiments, the Fc mutations comprise K326W, K334W, and H435A. In some embodiments, the Fc mutations comprise K326A, K334A, and H435A. In some embodiments, the Fc mutations comprise L234A, L235A, H310, and H435A. In some embodiments, the Fc mutations comprise L234F, L235E, H310, and H435A. In some embodiments, the Fc mutations comprise L234A, L235A, P329G, H310, and H435A. In some embodiments, the Fc mutations comprise L234A, L235A, P329G, P331S, H310, and H435A. In some embodiments, the Fc mutations comprise L234A, L235A, P329S, H310, and H435A. In some embodiments, the Fc mutations comprise N297A, H310, and H435A. In some embodiments, the Fc mutations comprise N297G, H310, and H435A. In some embodiments, the Fc mutations comprise N297Q, H310, and H435A. In some embodiments, the Fc mutations comprise P329G, H310, and H435A. In some embodiments, the Fc mutations comprise G236A, A330S, P331S, H310, and H435A. In some embodiments, the Fc mutations comprise S239D, 1332E, H310, and H435A. In some embodiments, the Fc mutations comprise S267E, H268F, S324T, I332E, H310, and H435A. In some embodiments, the Fc mutations comprise Y296W, T299A, V308P, H310, and H435A. In some embodiments, the Fc mutations comprise H435A, R409K, Y435H, H310, and H435A. In some embodiments, the Fc mutations comprise T307A, T309A, H310, and H435A. In some embodiments, the Fc mutations comprise T307A, T309K, H310, and H435A. In some embodiments, the Fc mutations comprise K322A, H310, and H435A. In some embodiments, the Fc mutations comprise K326W, K334W, H310, and H435A. In some embodiments, the Fc mutations comprise K326A, K334A, H310, and H435A.

[0175] The mutations and positions of the Fc domain, which can also be referred to as the Fc domain, are according to Kabat numbering.

[0176] As used herein, a Fc domain/domain comprising a mutation at a specific position is as compared to the wild-type Fc according to the numbering system (Kabat numbering) as referenced herein.

[0177] In some embodiments, a pharmaceutical composition comprising any one of the polypeptides provided herein is provided. In some embodiments, the composition comprises a dimer comprising a first polypeptide comprising any one of the polypeptides provided herein and a second polypeptide comprising any one of the polypeptides provided herein, wherein the first polypeptide and the second polypeptide are the same. In some embodiments, the composition comprises a dimer comprising a first polypeptide comprising any one of the polypeptides provided herein linked to a Fc domain, and a second polypeptide comprising any one of the polypeptides provided herein linked to a second Fc domain, wherein the first polypeptide and the second polypeptide are the same. In some embodiments, the first Fc domain and the second Fc domain comprise the same amino acid sequence. In some embodiments, the first Fc domain and the second Fc domain comprise different amino acid sequences, provided that the first and second Fc domains can form a dimer.

[0178] A protease or a polypeptide provided for herein may be produced by any suitable means. For example, the protease or the polypeptide may be synthesized directly using standard techniques known in the art.

[0179] As used herein, the terms “nucleic acid molecule” and “polynucleotide” may be used interchangeably and refer to a polymeric form of nucleotides of any length, either deoxyribonucleotides or ribonucleotides, or analogs thereof. Non-limiting examples of polynucleotides include a gene, a gene fragment, messenger RNA (mRNA), cDNA, recombinant polynucleotides, plasmids, vectors, isolated DNA of any sequence, isolated RNA of any sequence, nucleic acid probes, and primers. A polynucleotide of the disclosure may be provided in isolated or substantially isolated form. By substantially isolated, it is meant that there may be substantial, but not total, isolation of the polypeptide from any surrounding medium. The polynucleotides may be mixed with carriers or diluents which will not interfere with their intended use and still be regarded as substantially isolated. A nucleic acid sequence which “encodes” a selected polypeptide is a nucleic acid molecule which is transcribed (in the case of DNA) and translated (in the case of mRNA) into a polypeptide in vivo when placed under the control of appropriate regulatory sequences. The boundaries of the coding sequence are determined by a start codon at the 5′ (N-) terminus and a translation stop codon at the 3′ (C-) terminus. For the purposes of the disclosure, such nucleic acid sequences can include, but are not limited to, cDNA from viral, prokaryotic or eukaryotic mRNA, genomic sequences from viral or prokaryotic DNA or RNA, and even synthetic DNA sequences. A transcription termination sequence may be located 3′ to the coding sequence.

[0180] Polynucleotides encoding protease or polypeptides provided for herein may be synthesized according to methods well known in the art, as described by way of example in Sambrook et al (1989, Molecular Cloning—a laboratory manual; Cold Spring Harbor Press). The nucleic acid molecules of the present disclosure may be provided in the form of an expression cassette which includes control sequences operably linked to the inserted sequence, thus allowing for expression of the polypeptide of the disclosure in vivo. These expression cassettes, in turn, are typically provided within vectors (e.g., plasmids or recombinant viral vectors). Such an expression cassette may be administered directly to a host subject.

[0181] In some embodiments, the protease or the polypeptide provided for herein may be produced by transforming a cell, typically a bacterial cell, with a nucleic acid molecule or vector which encodes said protease or polypeptide. In some embodiments, a vector comprising a polynucleotide encoding a protease or a polypeptide provided for herein may be administered to a host subject. In some embodiments, the polynucleotide is prepared and/or administered using a vector. A suitable vector may be any vector which is capable of carrying a sufficient amount of genetic information, and allowing expression of a protease or a polypeptide of the disclosure. In some embodiments, nucleic acid molecules or a polynucleotide is provided that encodes a protease or a polypeptide as provided for herein. In some embodiments, the polynucleotide is DNA. In some embodiments, the polynucleotide is RNA, such as mRNA.

[0182] The present disclosure thus includes expression vectors that comprise such polynucleotide sequences. Such expression vectors are routinely constructed in the art of molecular biology and may for example involve the use of plasmid DNA and appropriate initiators, promoters, enhancers and other elements, such as for example polyadenylation signals which may be necessary, and which are positioned in the correct orientation, in order to allow for expression of a protease or a polypeptide of the disclosure. Other suitable vectors would be apparent to persons skilled in the art.

[0183] In some embodiments, the host subject may be a cell that has been modified to express a protease or a polypeptide provided for herein. Such cells typically include prokaryotic cells such as bacterial cells, for example E. coli. In some embodiments, the host subject may be an eukaryotic cell. In some embodiments, the cell may be cultured using routine methods to produce a polypeptide of the disclosure.

[0184] In some embodiments, a vector is provided comprising the nucleic acid molecule or polynucleotide encoding a polypeptide as provided for herein. In some embodiments, the vector is a non-viral vector. In some embodiments, the vector is a viral vector, such as, but not limited to a lentivirus, an AAV vector, an AV vector, and the like. In some embodiments, the non-viral vector is a plasmid. In some embodiments, the non-viral vector is mRNA encoding the polypeptide. In some embodiments, the mRNA is encapsulated. In some embodiments, the mRNA is encapsulated in a liposome. The mRNA can contain modified nucleotides or a modified backbone to increase the mRNA half-life.

[0185] In some embodiments, a cell is provided comprising a nucleic acid molecule encoding a polypeptide as provided for herein. In some embodiments, a cell is provide comprising a vector as provided for herein. In some embodiments, the cell is a eukaryotic cell. In some embodiments, the cell is a human cell or a yeast cell. In some embodiments, the cell is not a bacterial cell. In some embodiments, the cell is a bacterial cell or a prokaryotic cell, such as, but not limited to E. Coli. In some embodiments, the cell is not E. Coli. In some embodiments, the cell is not a prokaryotic cell. In some embodiments, a cell is provide comprising a vector as provided for herein.

[0186] A polypeptide may be derivatized or modified to assist with their production, isolation or purification. For example, where a protease or a polypeptide of the disclosure is produced by recombinant expression in a host cell, the sequence of the polypeptide may include an additional methionine (M) residue at the N terminus to improve expression. As another example, the protease or the polypeptide of the disclosure may be derivatized or modified by addition of a leader sequence, as provided for herein.

[0187] The amino acid sequence of a polypeptide may be modified to include non-naturally occurring amino acids, for example to increase stability. When the polypeptides are produced by synthetic means, such amino acids may be introduced during production. The polypeptides may also be modified following either synthetic or recombinant production. Polypeptides may also be produced using D-amino acids. In such cases the amino acids will be linked in reverse sequence in the C- to N-orientation. This is conventional in the art for producing such polypeptides.

[0188] In some embodiments, methods of making a polypeptide as provided for herein are provided. In some embodiments, the methods comprise culturing a cell comprising a nucleic acid molecule or polynucleotide encoding the polypeptide. In some embodiments, the cell is as provided herein, such as the cells described above. In some embodiments, the cell is cultured under conditions suitable to facilitate the expression of the polypeptide.

[0189] In some embodiments, methods of making a nucleic acid sequence encoding the polypeptide are provided. In some embodiments, the methods comprise providing a vector comprising a polynucleotide sequence encoding a polypeptide having protease activity and inserting into the vector sequence encoding a variant Fc molecule to form an amino acid sequence encoding the polypeptide; or b) providing a vector comprising sequence encoding a variant Fc molecule and inserting into the vector sequence encoding a polypeptide having protease activity to form an amino acid sequence encoding the polypeptide, thereby making an nucleic acid sequence encoding the polypeptide.

[0190] The nucleic acid molecules can be transferred into a cell to produce the polypeptide by any means or methods, such as by transfection, electroporation, transduction, and the like.

[0191] The following examples are illustrative, but not limiting, of the compounds, compositions and methods described herein. Other suitable modifications and adaptations known to those skilled in the art are within the scope of the following embodiments.

### EXAMPLES

### Example 1: Polypeptides Having IgE Protease Activity Exhibit Stable Thermal Profiles and Improved Cleavage Activity Over Parental Protease

[0192] Melting temperature (Tm) was measured by nanoDSF. Tm of each polypeptide was found by observing the fluorescence of the polypeptide at 350 and 330 nm while ramping the temperature from 20-95° C. The approximate size and monodispersity was measured by size exclusion chromatography. The protease was purified with majority population as monomers on analytical SEC, showing favorable thermostability profile, as shown in Table 4.

[0193] Protease activity was measured by end-point assay analyzed by CE-SDS. In brief, purified polypeptides were added directly to a fixed amount of IgE (0.5 mg/mL of the polypepitide). Reactions were incubated at 37° C. overnight. The reactions were quenched with IAA, and products were measured using a PerkinElmer® LabChip® to perform CE-SDS. Both the appearance of new bands (i.e., single cut IgE (scIgE) and F(ab′) 2 IgE signals) and disappearance of intact Ig target bands were used to confirm activity/specificity of the proteases within this Ig target group Results were confirmed over several different reactions and CE-SDS measurements. PRT-4 was identified as a more stable and more active IgE cleaving protease than PRT-1.

TABLE 4

| Variant | Mutation(s) | Tₘ | Activity |
|---|---|---|---|
| PRT-1 | — | 46.4° C. | very weak |
| PRT-17 | T122S | 45.6° C. | single cleavage |
| PRT-4 | L153P, S128A, F333N | 53.2° C. | full cleavage |
| PRT-8 | T122S, L153P, S128A | 54.5° C. | single cleavage |
| PRT-10 | T122S, S128A, F333N | 51.7° C. | full cleavage |

[0194] In a separate experiment, cleavage activity against IgE and IgG1 was assessed using CE-SDS or MSD methods described herein. All polypeptides shown in Table 5 below displayed IgE cleavage activity as measured by SDS where the cleavage products of IgE were visualized. Table 5 also provides IgE Protease EC50 values for selected IgE proteases as indicated or if not calculated it is indicated by the term “n/a”. Tm was measured as described above, and polypeptides were also loaded to analytical SEC to check for monodispersity of Protein of Interest (POI). All test articles were purified with the majority population present as monomers as shown in Table 5 below.

TABLE 5

| | | | EC50 | EC50 | EC50 | IgE |
|---|---|---|---|---|---|---|
| | | | CE-SDS | CE-SDS | MSD | Cleavage |
| | Tm1 | % | IgE | IgG1 | IgE | in CE-SDS |
| Name | (° C.) | POI | (uM) | (uM) | (uM) | Assay |
| PRT-1 | 46.4 | n/a | n/a | n/a | n/a | Yes |
| PRT-2 | 45.9 | 68 | n/a | n/a | n/a | SC (single |
| | | | | | | cut) |
| PRT-3 | 52.3 | 65 | n/a | n/a | n/a | Yes |
| PRT-4 | 53.2 | 49 | 1.16 | 1.44 | 2.07 | Yes |
| PRT-5 | 46.9 | 62 | n/a | n/a | n/a | Yes |
| PRT-6 | 48.5 | 59 | n/a | n/a | n/a | Yes |
| PRT-7 | 48.0 | 62 | n/a | n/a | n/a | SC (single |
| | | | | | | cut) |
| PRT-8 | 54.5 | 74 | n/a | n/a | n/a | SC (single |
| | | | | | | cut) |
| PRT-9 | 47.2 | 63 | n/a | n/a | n/a | Yes |
| PRT-10 | 51.7 | 63 | n/a | n/a | n/a | Yes |
| PRT-11 | 45.4 | n/a | n/a | n/a | n/a | SC (single |
| | | | | | | cut) |
| PRT-12 | 45.3 | 50 | n/a | n/a | n/a | Yes |
| PRT-13 | 45.5 | n/a | n/a | n/a | n/a | SC (single |
| | | | | | | cut) |
| PRT-14 | 46.2 | 63 | n/a | n/a | n/a | Yes |
| PRT-15 | 45.3 | n/a | n/a | n/a | n/a | SC (single |
| | | | | | | cut) |
| PRT-16 | 44.6 | n/a | n/a | n/a | n/a | SC (single |
| | | | | | | cut) |
| PRT-17 | 46.5 | 81 | n/a | n/a | n/a | Yes |
| PRT-18 | 45.7 | 49 | n/a | n/a | n/a | Yes |
| PRT-19 | 46.5 | n/a | n/a | n/a | n/a | SC (single |
| | | | | | | cut) |
| PRT-20 | 46.5 | 62 | n/a | n/a | n/a | Yes |
| PRT-21 | 46.9 | n/a | n/a | n/a | n/a | SC (single |
| | | | | | | cut) |
| PRT-22 | 45.1 | 68 | n/a | n/a | n/a | Yes |
| PRT-240 | 44.6 | 51 | n/a | n/a | n/a | Yes |
| PRT-241 | 45.3 | n/a | n/a | n/a | n/a | SC (single |
| | | | | | | cut) |
| PRT-23 | 51.9407082 | n/a | n/a | n/a | n/a | Yes |
| PRT-24 | 53.1527863 | n/a | n/a | n/a | n/a | Yes |
| PRT-25 | 50.5786438 | n/a | n/a | n/a | n/a | Yes |
| PRT-26 | 51.730751 | n/a | n/a | n/a | n/a | Yes |
| PRT-27 | 51.9239807 | n/a | n/a | n/a | n/a | Yes |
| PRT-28 | 53.4722176 | n/a | n/a | n/a | n/a | Yes |
| PRT-29 | 51.1548538 | n/a | n/a | n/a | n/a | Yes |
| PRT-30 | 51.2497406 | n/a | n/a | n/a | n/a | Yes |
| PRT-31 | 50.7491608 | n/a | n/a | n/a | n/a | Yes |
| PRT-32 | 51.8809319 | n/a | n/a | n/a | n/a | Yes |
| PRT-33 | 49.4964218 | n/a | n/a | n/a | n/a | Yes |
| PRT-34 | 52.3817635 | n/a | n/a | n/a | n/a | Yes |
| PRT-35 | 53.3928337 | n/a | n/a | n/a | n/a | Yes |
| PRT-36 | 55.0777931 | n/a | n/a | n/a | n/a | Yes |
| PRT-37 | 53.485733 | n/a | n/a | n/a | n/a | Yes |
| PRT-38 | 53.5205574 | n/a | n/a | n/a | n/a | Yes |
| PRT-39 | 53.4476395 | n/a | n/a | n/a | n/a | Yes |
| PRT-40 | 53.2519264 | n/a | n/a | n/a | n/a | Yes |
| PRT-41 | 51.5434418 | n/a | 0.51 | 3.14 | n/a | Yes |
| PRT-42 | 52.2763786 | n/a | n/a | n/a | n/a | Yes |
| PRT-43 | 51.5486183 | n/a | 0.26 | 4.75 | 0.369 | Yes |
| PRT-44 | 55.2020988 | n/a | n/a | n/a | n/a | Yes |
| PRT-45 | 52.063118 | n/a | n/a | n/a | n/a | Yes |
| PRT-46 | 51.3904076 | n/a | 0.42 | 6.43 | n/a | Yes |
| PRT-47 | 52.5997353 | n/a | n/a | n/a | n/a | Yes |
| PRT-48 | 52.2065239 | n/a | n/a | n/a | n/a | Yes |
| PRT-49 | 52.317955 | n/a | n/a | n/a | n/a | Yes |
| PRT-50 | 53.4346657 | n/a | n/a | n/a | n/a | Yes |
| PRT-51 | 51.3877029 | n/a | n/a | n/a | n/a | Yes |
| PRT-52 | 50.4173393 | n/a | n/a | n/a | n/a | Yes |
| PRT-53 | 53.7835388 | n/a | n/a | n/a | n/a | Yes |
| PRT-54 | 55.3129883 | n/a | n/a | n/a | n/a | Yes |
| PRT-55 | 55.4130745 | n/a | n/a | n/a | n/a | Yes |
| PRT-56 | 55.0503502 | n/a | n/a | n/a | n/a | Yes |
| PRT-57 | 56.1044083 | n/a | n/a | n/a | n/a | SC (single |
| | | | | | | cut) |
| PRT-58 | 54.2344627 | n/a | n/a | n/a | n/a | Yes |
| PRT-59 | 52.7204781 | n/a | 0.69 | 18.67 | n/a | Yes |
| PRT-60 | 53.1412735 | n/a | n/a | n/a | n/a | Yes |
| PRT-61 | 54.0746651 | n/a | n/a | n/a | n/a | Yes |
| PRT-62 | 53.145607 | n/a | 0.42 | 5.1 | n/a | Yes |
| PRT-63 | 53.4345207 | n/a | n/a | n/a | n/a | Yes |
| PRT-64 | 54.0387344 | n/a | n/a | n/a | n/a | Yes |
| PRT-65 | 52.5188217 | n/a | 0.49 | 4 | n/a | Yes |
| PRT-66 | 53.605732 | n/a | n/a | n/a | n/a | Yes |
| PRT-67 | 52.8675232 | n/a | n/a | n/a | n/a | Yes |
| PRT-68 | 53.9576263 | n/a | n/a | n/a | n/a | SC (single |
| | | | | | | cut) |
| PRT-69 | 52.2696648 | n/a | n/a | n/a | n/a | Yes |
| PRT-70 | 51.6251831 | n/a | n/a | n/a | n/a | Yes |
| PRT-71 | 50.9279747 | n/a | n/a | n/a | n/a | Yes |
| PRT-72 | 51.3287468 | n/a | n/a | n/a | n/a | Yes |
| PRT-73 | 51.6389732 | n/a | n/a | n/a | n/a | Yes |
| PRT-74 | 51.5259933 | n/a | n/a | n/a | n/a | Yes |
| PRT-75 | 53.1374321 | n/a | n/a | n/a | n/a | Yes |
| PRT-76 | 53.4998703 | n/a | n/a | n/a | n/a | Yes |
| PRT-77 | 53.2173042 | n/a | n/a | n/a | n/a | Yes |
| PRT-78 | 52.9008942 | n/a | n/a | n/a | n/a | Yes |
| PRT-79 | 54.0034332 | n/a | n/a | n/a | n/a | Yes |
| PRT-80 | 55.2028923 | n/a | n/a | n/a | n/a | Yes |
| PRT-81 | 53.4392586 | n/a | 0.36 | 2.31 | 0.407 | Yes |
| PRT-82 | 53.8643684 | n/a | n/a | n/a | n/a | Yes |
| PRT-83 | 53.5775528 | n/a | n/a | n/a | n/a | Yes |
| PRT-84 | 52.6416435 | n/a | n/a | n/a | n/a | Yes |
| PRT-85 | 52.3788872 | n/a | 0.36 | 1.96 | n/a | Yes |
| PRT-86 | 51.1456528 | n/a | n/a | n/a | n/a | Yes |
| PRT-87 | 53.3139343 | n/a | n/a | n/a | n/a | Yes |
| PRT-88 | 51.6169701 | n/a | 0.17 | 0.99 | 0.366 | Yes |
| PRT-89 | 51.5808563 | n/a | 0.07 | 37.25 | 0.042 | Yes |
| PRT-90 | 54.8071022 | n/a | n/a | n/a | n/a | Yes |
| PRT-91 | 54.0097847 | n/a | n/a | n/a | n/a | SC (single |
| | | | | | | cut) |
| PRT-94 | 52.5397873 | n/a | n/a | n/a | n/a | Yes |
| PRT-95 | 54.6420822 | n/a | n/a | n/a | n/a | Yes |
| PRT-96 | 53.9702492 | n/a | n/a | n/a | n/a | Yes |
| PRT-97 | 54.8722763 | n/a | n/a | n/a | n/a | Yes |
| PRT-98 | 53.8322334 | n/a | n/a | n/a | n/a | Yes |
| PRT-99 | 52.5295067 | n/a | n/a | n/a | n/a | Yes |
| PRT-100 | 53.5640297 | n/a | n/a | n/a | n/a | Yes |
| PRT-101 | 51.5430946 | n/a | n/a | n/a | n/a | Yes |
| PRT-102 | 52.969532 | n/a | n/a | n/a | n/a | Yes |
| PRT-103 | 57.7853355 | n/a | n/a | n/a | n/a | Yes |
| PRT-104 | 51.8296776 | n/a | n/a | n/a | n/a | Yes |
| PRT-105 | 52.3402939 | n/a | n/a | n/a | n/a | Yes |
| PRT-106 | 53.492775 | n/a | n/a | n/a | n/a | Yes |
| PRT-107 | 52.9401703 | n/a | n/a | n/a | n/a | Yes |
| PRT-108 | 52.2916222 | n/a | n/a | n/a | n/a | Yes |
| PRT-109 | 52.995163 | n/a | n/a | n/a | n/a | Yes |
| PRT-110 | 51.8660774 | n/a | n/a | n/a | n/a | Yes |
| PRT-111 | 47.8136139 | n/a | n/a | n/a | n/a | Yes |
| PRT-112 | 48.7256622 | n/a | n/a | n/a | n/a | Yes |
| PRT-113 | 52.3498077 | n/a | n/a | n/a | n/a | Yes |
| PRT-114 | 53.7827377 | n/a | n/a | n/a | n/a | Yes |
| PRT-115 | 51.4999504 | n/a | n/a | n/a | n/a | Yes |
| PRT-116 | 50.4459763 | n/a | n/a | n/a | n/a | Yes |
| PRT-117 | 50.1363907 | n/a | n/a | n/a | n/a | Yes |
| PRT-118 | 52.6067047 | n/a | n/a | n/a | n/a | Yes |

### Example 2: Polypeptides Having IgE Protease Activity Show Specificity for IgE

[0195] Purified polypeptides were added directly to a fixed amount of IgE at different concentrations. Reactions were incubated at 37° C. overnight. The reactions were quenched with IAA, and products were measured using a PerkinElmer® LabChip® to perform CE-SDS. Both the appearance of new bands (i.e., single cut IgE (scIgE) and F(ab′) 2 IgE signals) and disappearance of intact Ig target bands were used to confirm activity/specificity of the polypeptides within this Ig target group. Results were confirmed over several different reactions and CE-SDS measurements.

[0196] As shown in FIG. 1, the polypeptides cleave soluble intact IgE.

### Example 3: Polypeptides Having IgE Protease Activity Fully Cleave IgE and Show Improved Potency

[0197] Human IgE antibody was incubated with IgE cleaving protease PRT-4 for 24 hours and 48 hours at 37° C. Digestion samples were loaded to JESS to separate the bands of intact IgE (substrate), single cut IgE (intermediate product), and F(ab′) 2 (final product). Detection of bands was achieved using a mixture of anti-kappa light chain and anti-lambda light chain antibodies. Full cleavage of IgE was observed with PRT-4 at both timepoints.

[0198] In next experiment, recombinant human IgE antibody (concentration-0.1 mg/ml) was incubated with IgE cleaving polypeptides PRT-4, PRT-88, PRT-43, PRT-81 and PRT-89 in a dose-dependent manner for 24 hours at 37° C. Digested samples were added to MSD plate that was captured with anti-human IgE capture antibody and blocked appropriately. Signal was detected using anti-human light chain antibody and potency was depicted as EC50 values.

[0199] Full cleavage of IgE was observed with all the IgE cleaving polypeptides. PRT-89 showed improved potency compared to all other polypeptides.

TABLE 7

| | PRT-4 | PRT-88 | PRT-43 | PRT-81 | PRT-89 |
|---|---|---|---|---|---|
| EC50 (μM) | 2.070 | 0.366 | 0.369 | 0.407 | 0.042 |

### Example 4: Polypeptides Having IgE Protease Activity Cleave Soluble Human IgE

[0200] Human IgE antibody (concentration-0.1 mg/ml) was incubated with polypeptides PRT-4, PRT-88, PRT-43, PRT-81 and PRT-89 (each at 0.35 μM concentration) for 24 hours at 37° C. Digested samples were loaded to JESS to separate the bands of intact IgE (substrate), single cut IgE (intermediate product), and F(ab′) 2 (final product). Detection of bands was achieved using a mixture of anti-kappa light chain and anti-lambda light chain antibodies.

[0201] Full cleavage of IgE was observed with PRT-89 at the concentration tested compared to others which showed single cleavage.

### Example 5: Identification of IgE Residues for Polypeptide Binding

[0202] Structure of protease bound to IgE Fc was determined by single particle cryo-electron microscopy using a Cys to Ser inactive protease. Data was collected on a Titan Krios (ThermoFisher Scientific) electron microscope. The data was processed using CryoSPARC software (Structura Biotechnology) and the structural models were built in Coot (free software under GNU General Public License). The complex structures were analyzed using ChimeraX software (UCSF) to determine epitope contact residues, which are defined as amino acid residues from the protease that are within 4 Å of any atoms in IgE Fc. Thus, the epitope for the polypeptides described herein includes residues S332, N333, P334, R335, G336, V337, S338, A339, D363, L364, A365, P366, K368, A378, K392, R394, N395, G396, T397, R420, H423, P424, H425, L426, P427, R428, A429, M431, R432, S433 of IgE. The residue numbering is as set forth in SEQ ID NO: 246. The epitope on the non-cleaved Fc fragment of IgE includes D363, A365, P366, K368, K392, R394, N395, G396, T397, and H425 of IgE. The residue numbering is as set forth in SEQ ID NO: 246. The epitope on the cleaved Fc fragment of IgE includes S332, N333, P334, R335, G336, V337, S338, A339, D363, L364, A365, K368, A378, R420, H423, P424, H425, L426, P427, R428, A429, M431, R432, and S433 of IgE. The residue numbering is as set forth in SEQ ID NO: 246.

### Example 6: N-Terminal Sequencing Confirms Cleavage Site on IgE

[0203] IgE (7 μg) was digested with PRT-17 (1:1) for 24 hours at 37° C. The reaction mixture was loaded and separated on a 10% mini-protean TGX gel. The resulting gel was blotted onto a PVDF membrane (Trans-Blot Turbo Midi 0.2 μM PVDF). Membrane was stained using InstantBlue coomassie stain and destained with 40% methanol and 5% acetic acid. The bands corresponding to the product were cut from the membrane and analyzed for N-terminal sequencing. N-terminal sequencing confirmed the cleavage site of GVSAYLS (SEQ ID NO: 250) on IgE (SEQ ID NO: 246).

### Example 7: Molecules Comprising Polypeptides Having IgE Protease Activity Cleave Soluble IgE but not IgG

[0204] Human IgE or IgG antibody was incubated with a control or molecules comprising polypeptides having IgE protease activity, such as the dimer molecules provided herein. Digested samples were loaded to JESS automated Western Blott system. Cleavage of human IgE was observed with the molecules comprising polypeptides having IgE protease activity, such as the dimer molecules provided herein. No cleavage of human IgG was observed.

[0205] Human IgE antibody was incubated with IgE cleaving protease PRT-4 for 24 hours and 48 hours at 37° C. Digestion samples were loaded to JESS to separate the bands of intact IgE (substrate), single cut IgE (intermediate product), and F(ab′) 2 (final product). Detection of bands was achieved using a mixture of anti-kappa light chain and anti-lambda light chain antibodies. Full cleavage of IgE was observed with PRT-4 at both timepoints.

[0206] In next experiment, human IgE antibody was incubated with a control or molecules comprising polypeptides having IgE protease activity, such as the dimer molecules provided herein in a dose-dependent manner. Digested samples were added to MSD plate that was captured with anti-human IgE capture antibody and blocked appropriately. Signal was detected using anti-human light chain antibody and potency was depicted as EC50 values.

[0207] Cleavage of IgE was observed with all molecules comprising polypeptides having IgE protease activity, such as the dimer molecules provided herein.

### Example 8: a Molecule Comprising Polypeptides Having IgE Protease Activity Demonstrates Ability to Cleave B-Cell Receptors (BCR)

[0208] IgE+B-cell myeloma cells were incubated with a molecule comprising polypeptides having IgE protease activity, such as the dimer molecules provided herein in a dose-dependent manner. Digested samples were added to MSD plate, captured, and blocked appropriately. Signal was detected using anti-human light chain antibody and potency was depicted as EC50 values.

[0209] BCR cleavage was observed in a dose dependent manner. Accordingly, the molecule comprising a polypeptide having IgE protease activity demonstrates ability to cleave BCR.

### Example 9: a Molecule Comprising Polypeptides Having IgE Protease Activity Reduces FcεRI Expression in IgE Spiked Bone Marrow-Derived Mast Cells from Humanized Mice

[0210] FcεRI is a receptor on mast cells and basophils that binds to the Fc domain of IgE and plays a critical role in allergic responses. Treatment of mast cell with a molecule comprising polypeptides having IgE protease activity, such as the dimer molecules provided herein in a dose-dependent manner showed a rapid reduction in expression of FcεRI.

### Example 10: a Molecule Comprising Polypeptides Having IgE Protease Activity Prevented and Treated Systemic Anaphylactic Reactions In Vivo, with Similar Efficacy to Omalizumab

[0211] Humanized IgE/FcεRI mice were treated on day 1 with a vehicle, omalizumab, or a molecule comprising polypeptides having IgE protease activity, such as the dimer molecules provided herein, administered intravenously at a dose of 0.3 mpk. On day 2 the mice were sensitized using anti-NIP IgE administered intraperitoneally. Baseline core temperature was measured. On day 3 the mice were challenged with NIP BSA administered intraperitoneally. Core body temperature was measured every 2 hours following challenge. The molecule comprising polypeptides having IgE protease activity, such as the dimer molecules provided herein prevented the systematic anaphylactic reaction.

[0212] In another experiment, humanized IgE/FcεRI mice were sensitized using anti-NIP IgE administered intraperitoneally. Baseline core temperature was measured. On day 2 the mice were treated on day 1 with a vehicle, omalizumab, or a molecule comprising polypeptides having IgE protease activity, such as the dimer molecules provided herein, administered intravenously at a dose of 0.3 mpk. On day 3 the mice were challenged with NIP BSA administered intraperitoneally. Core body temperature was measured every 2 hours following challenge. The molecule comprising polypeptides having IgE protease activity, such as the dimer molecules provided herein rapidly treated systematic anaphylactic reaction in vivo in a therapeutic mouse model.

### Example 11: Molecules Comprising Polypeptides Having IgE Protease Activity Show Comparable Efficacy to Omalizumab in Acute Passive Cutaneous Anaphylaxis Model

[0213] Humanized FcεRI mice were treated on day 1 with S+C, PBS+C, omalizumab, or molecules comprising polypeptides having IgE protease activity, such as the dimer molecules provided herein administered intravenously at a dose of 1 mpk. On day 2 the mice were sensitized with anti-NIP IgE administered intradermally. On day 3 the mice were challenged with NIP BSA with Evan's blue dye administered intravenously. 2 hours following challenge Evan's blue dye leakage was measured. Efficacy of molecules comprising polypeptides having IgE protease activity, such as the dimer molecules provided herein to prevent dye leakage was comparable to clinically relevant doses of omalizumab in this model.

### Example 12: Molecules Comprising Polypeptides Having IgE Protease Activity Exhibit Favorable PK in Mice

[0214] Wild-type Balb/c mice were treated with a vehicle, or molecules comprising polypeptides having IgE protease activity, such as the dimer molecules provided herein administered intravenously at a dose of 1 mpk. 15 minutes following treatment the mice were administered intravenously recombinant human IgE at a dose of 50 μg, and IVIG at a dose of 7.5 mg. Blood was collected at 0.5 hours, 2 hours, 4 hours, 24 hours, 48 hours, 72 hours, 5 days, 7 days, and 10 days following initial treatment. Plasma levels of the vehicle or the molecules, and IgE cleavage were assessed. The molecules comprising polypeptides having IgE protease activity, such as the dimer molecules provided herein showed favorable PK and half-life of 212, 149, and 207 hours.

### Example 13: Molecules Comprising Polypeptides Having IgE Protease Activity Demonstrate No Binding to Pre-Existing Anti-Drug Antibodies (ADA) in IVIg and Plasma

[0215] Molecules comprising polypeptides having IgE protease activity, such as the dimer molecules provided herein were evaluated for binding to pre-existing antibodies in IVIG and plasma relative to positive control, through an electrochemiluminescence (ECL) immunoassay. The molecules comprising polypeptides having IgE protease activity, such as the dimer molecules provided herein exhibited no binding to pre-existing ADA, measured by ECL signal.

### Example 14: Molecules Comprising Polypeptides Having IgE Protease Activity Exhibit Attributes Favorable of Long-Term Storage, Subcutaneous Administration, and Low Off-Target Activity

[0216] Molecules comprising polypeptides having IgE protease activity, such as the dimer molecules provided herein showed high stability with no formation of aggregates over 1 month at 4° C., supportive of favorable long-term storage. Molecules comprising polypeptides having IgE protease activity, such as the dimer molecules provided herein also showed viscosity levels that were suitable for subcutaneous injection, as shown in the table below.

TABLE 8

| Protease | Average Viscosity (mPa*s) | n | % CV |
|---|---|---|---|
| Molecule 1 | 1.84 | 10 | 7.02 |
| Molecule 2 | 1.76 | 10 | 0.60 |
| Molecule 3 | 1.58 | 10 | 2.53 |

[0217] Molecules comprising polypeptides having IgE protease activity, such as the dimer molecules provided herein also showed low polyreactivity to baculovirus particle, cardiolipin, keyhole limpet hemocyanin, and double stranded DNA, predictive of favorable PK.

### Example 15: Polypeptides Having IgE Protease Activity Exhibit Stable Thermal Profiles and Improved Cleavage Activity Over Parental Protease

[0218] Cleavage activity against IgE and IgG1 was assessed using CE-SDS or MSD methods described herein. All polypeptides shown in Table 9 and Table 10 below displayed IgE cleavage activity as measured by SDS where the cleavage products of IgE were visualized. Table 9 and Table 10 also provides IgE Protease EC50 values for selected IgE proteases as indicated or if not calculated it is indicated by the term “n/a”. Tm was measured as described above, and polypeptides were also loaded to analytical SEC to check for monodispersity of Protein of Interest (POI). All test articles were purified with the majority population present as monomers as shown in Table 9 and Table 10 below.

TABLE 9

| | | | EC50 | EC50 | EC50 | IgE |
|---|---|---|---|---|---|---|
| | | | CE-SDS | CE-SDS | MSD | Cleavage |
| | Tm1 | % | IgE | IgG1 | IgE | in CE-SDS |
| Name | (° C.) | POI | (uM) | (uM) | (uM) | Assay |
| PRT-492 | n/a | n/a | n/a | n/a | n/a | n/a |
| PRT-493 | n/a | n/a | n/a | n/a | n/a | n/a |
| PRT-244 | 50.98 | n/a | n/a | n/a | n/a | sc (single cut) |
| PRT-245 | 50.68 | n/a | n/a | n/a | n/a | sc (single cut) |
| PRT-246 | 51.5 | n/a | n/a | n/a | n/a | sc (single cut) |
| PRT-247 | 49.67 | n/a | n/a | n/a | n/a | yes |
| PRT-248 | 49.3 | n/a | n/a | n/a | n/a | yes |
| PRT-249 | 47.27 | n/a | n/a | n/a | n/a | yes |
| PRT-250 | 49.76 | n/a | n/a | n/a | n/a | yes |
| PRT-251 | 49.96 | n/a | n/a | n/a | n/a | sc (single cut) |
| PRT-252 | 47.93 | n/a | n/a | n/a | n/a | sc (single cut) |
| PRT-253 | 50.03 | n/a | n/a | n/a | n/a | sc (single cut) |
| PRT-254 | n/a | n/a | n/a | n/a | n/a | n/a |
| PRT-255 | n/a | n/a | n/a | n/a | n/a | n/a |
| PRT-256 | n/a | n/a | n/a | n/a | n/a | n/a |
| PRT-257 | n/a | n/a | n/a | n/a | n/a | n/a |
| PRT-258 | n/a | n/a | n/a | n/a | n/a | n/a |
| PRT-259 | 43.76198196 | n/a | n/a | n/a | n/a | yes |
| PRT-260 | 40.83691025 | n/a | n/a | n/a | n/a | yes |
| PRT-261 | 48.13053513 | n/a | n/a | n/a | n/a | yes |
| PRT-262 | 38.44819641 | n/a | n/a | n/a | n/a | yes |
| PRT-263 | 43.80036926 | n/a | n/a | n/a | n/a | yes |
| PRT-264 | 51.95593262 | n/a | 1.008 | n/a | n/a | yes |
| PRT-265 | 49.4007988 | n/a | n/a | n/a | n/a | yes |
| PRT-266 | 49.84073639 | n/a | n/a | n/a | n/a | yes |
| PRT-267 | 46.30564499 | n/a | n/a | n/a | n/a | yes |
| PRT-268 | 46.28196335 | n/a | n/a | n/a | n/a | yes |
| PRT-269 | 44.04050827 | n/a | 4.093 | n/a | n/a | yes |
| PRT-270 | 41.60387421 | n/a | n/a | n/a | n/a | yes |
| PRT-271 | 49.88454056 | n/a | 0.1055 | n/a | n/a | yes |
| PRT-272 | 50.59305954 | n/a | 0.6144 | n/a | n/a | yes |
| PRT-273 | 48.86257172 | n/a | 0.9515 | n/a | n/a | yes |
| PRT-274 | 38.25500488 | n/a | n/a | n/a | n/a | yes |
| PRT-275 | 48.31901932 | n/a | n/a | n/a | n/a | yes |
| PRT-276 | 49.16300583 | n/a | 1.43 | n/a | n/a | yes |
| PRT-277 | 53.43740845 | n/a | 0.07473 | n/a | n/a | yes |
| PRT-278 | 47.74253082 | n/a | 1.613 | n/a | n/a | yes |
| PRT-279 | 41.28607559 | n/a | n/a | n/a | n/a | yes |
| PRT-280 | 33.78106308 | n/a | n/a | n/a | n/a | yes |
| PRT-281 | 39.57804871 | n/a | n/a | n/a | n/a | yes |
| PRT-282 | 42.87959671 | n/a | 0.8608 | n/a | n/a | yes |
| PRT-283 | 40.88740921 | n/a | 0.8135 | n/a | n/a | yes |
| PRT-284 | 44.02651596 | n/a | n/a | n/a | n/a | yes |
| PRT-285 | 43.68782425 | n/a | n/a | n/a | n/a | yes |
| PRT-286 | 39.54377365 | n/a | n/a | n/a | n/a | yes |
| PRT-287 | 39.71357727 | n/a | n/a | n/a | n/a | yes |
| PRT-288 | 42.24381638 | n/a | n/a | n/a | n/a | yes |
| PRT-289 | 39.13557053 | n/a | n/a | n/a | n/a | yes |
| PRT-290 | 41.00407791 | n/a | n/a | n/a | n/a | yes |
| PRT-291 | 43.2956543 | n/a | n/a | n/a | n/a | yes |
| PRT-292 | 40.5482254 | n/a | n/a | n/a | n/a | yes |
| PRT-293 | 43.41492462 | n/a | n/a | n/a | n/a | yes |
| PRT-294 | 50.12894821 | n/a | 0.7602 | n/a | n/a | yes |
| PRT-295 | 48.63828659 | n/a | n/a | n/a | n/a | yes |
| PRT-296 | 47.57891846 | n/a | n/a | n/a | n/a | yes |
| PRT-297 | 49.10969162 | n/a | n/a | n/a | n/a | yes |
| PRT-298 | 48.3764267 | n/a | 0.1069 | n/a | n/a | yes |
| PRT-299 | 43.78216553 | n/a | n/a | n/a | n/a | yes |
| PRT-300 | 48.02518082 | n/a | n/a | n/a | n/a | yes |
| PRT-301 | 48.58825684 | n/a | n/a | n/a | n/a | yes |
| PRT-302 | 42.35677338 | n/a | n/a | n/a | n/a | yes |
| PRT-303 | 49.93935013 | n/a | 0.104 | n/a | n/a | yes |
| PRT-304 | 42.65013885 | n/a | n/a | n/a | n/a | yes |
| PRT-305 | 49.57157898 | n/a | n/a | n/a | n/a | yes |
| PRT-306 | 38.70973587 | n/a | n/a | n/a | n/a | yes |
| PRT-307 | 40.05797195 | n/a | n/a | n/a | n/a | yes |
| PRT-308 | 42.0752182 | n/a | n/a | n/a | n/a | yes |
| PRT-309 | 54.21295166 | n/a | 0.3312 | n/a | n/a | yes |
| PRT-310 | 45.64842224 | n/a | n/a | n/a | n/a | yes |
| PRT-311 | 44.28898621 | n/a | n/a | n/a | n/a | yes |
| PRT-312 | 43.80886459 | n/a | n/a | n/a | n/a | yes |
| PRT-313 | 51.13744354 | n/a | 0.4075 | n/a | n/a | yes |
| PRT-314 | 49.00503159 | n/a | 0.2328 | n/a | n/a | yes |
| PRT-315 | 44.56128311 | n/a | n/a | n/a | n/a | yes |
| PRT-316 | 44.14808655 | n/a | n/a | n/a | n/a | yes |
| PRT-317 | 51.2220993 | n/a | 1.794 | n/a | n/a | yes |
| PRT-318 | 43.91475677 | n/a | n/a | n/a | n/a | yes |
| PRT-319 | 49.3368721 | n/a | 0.143 | n/a | n/a | yes |
| PRT-320 | 42.33901215 | n/a | n/a | n/a | n/a | yes |
| PRT-321 | 46.95602417 | n/a | n/a | n/a | n/a | yes |
| PRT-322 | 48.54349136 | n/a | n/a | n/a | n/a | yes |
| PRT-323 | 39.25563812 | n/a | n/a | n/a | n/a | yes |
| PRT-324 | 50.44552612 | n/a | n/a | n/a | n/a | yes |
| PRT-325 | 53.13976288 | n/a | n/a | n/a | n/a | yes |
| PRT-326 | 49.12893295 | n/a | n/a | n/a | n/a | yes |
| PRT-327 | 51.58704758 | n/a | n/a | n/a | n/a | yes |
| PRT-328 | 53.40829468 | n/a | n/a | n/a | n/a | yes |
| PRT-329 | 51.02653885 | n/a | n/a | n/a | n/a | yes |
| PRT-330 | 50.95039749 | n/a | n/a | n/a | n/a | yes |
| PRT-331 | 47.05178452 | n/a | n/a | n/a | n/a | yes |
| PRT-332 | 55.97952271 | n/a | 0.2172 | n/a | n/a | yes |
| PRT-333 | 53.2 | 86 | 0.7 | n/a | n/a | yes |
| PRT-334 | 56.9 | 86 | 0.7 | n/a | n/a | yes |
| PRT-335 | 57.6 | 100 | 2 | n/a | n/a | yes |
| PRT-336 | 50.9 | 95 | 2 | n/a | n/a | yes |
| PRT-337 | 54.7 | 88 | 0.6 | n/a | n/a | yes |

TABLE 10

| | | | | EC50 | | IgE |
|---|---|---|---|---|---|---|
| | | | EC50 | CE- | EC50 | Cleavage |
| | | | CE-SDS | SDS | MSD | in |
| | Tm1 | % | IgE | IgG1 | IgE | CE-SDS |
| Name | (° C.) | POI | (uM) | (uM) | (uM) | Assay |
| FP1 | 47.09824753 | 55 | n/a | n/a | n/a | yes |
| FP2 | 52.58 | n/a | 0.2119 | n/a | 0.1401 | yes |
| FP3 | 49.69 | n/a | 0.07149 | n/a | 0.1137 | yes |
| FP4 | 49.07 | n/a | n/a | n/a | n/a | yes |
| FP5 | 50.73 | n/a | n/a | n/a | n/a | yes |
| FP6 | 47.31 | n/a | n/a | n/a | 0.09943 | yes |
| FP7 | 52.66 | n/a | n/a | n/a | n/a | yes |
| FP8 | 52.32 | n/a | n/a | n/a | n/a | yes |
| FP9 | 54.72 | n/a | n/a | n/a | n/a | yes |
| FP10 | n/a | n/a | n/a | n/a | n/a | n/a |
| FP11 | 52.31 | 75.44 | 0.06852 | n/a | | yes |
| FP12 | 54.92 | 69.6 | 0.04333 | n/a | 0.000753 | yes |
| FP13 | 52.4 | 75.77 | 0.03185 | 21.33 | n/a | yes |
| FP14 | 53.45 | 71.07 | 0.03185 | n/a | n/a | yes |
| FP15 | 51.99 | 74.5 | 0.05468 | n/a | n/a | yes |
| FP16 | 50.55 | 79.45 | 0.04703 | 8.716 | n/a | yes |
| FP17 | 51.45 | 72.99 | 0.05631 | n/a | n/a | yes |
| FP18 | 54.52 | 79 | n/a | n/a | n/a | yes |
| FP19 | 56.7 | 92 | 0.02176 | 7.236 | 0.001204 | yes |
| FP20 | 54.83 | 90 | n/a | n/a | n/a | yes |
| FP21 | 53.33 | 67 | n/a | n/a | n/a | yes |
| FP22 | 56.45 | 94 | n/a | n/a | n/a | yes |
| FP23 | 55.85 | 89 | n/a | n/a | n/a | yes |
| FP24 | 56.03 | 84 | n/a | n/a | n/a | yes |
| FP25 | 51.89 | 72 | n/a | n/a | n/a | yes |
| FP26 | 54.48 | 75 | n/a | n/a | n/a | yes |
| FP27 | 54.63 | 88 | n/a | n/a | n/a | yes |
| FP28 | 53.34 | 76 | n/a | n/a | n/a | yes |
| FP29 | 53.18 | 88 | n/a | n/a | n/a | yes |
| FP30 | 51.68 | 78 | n/a | n/a | n/a | yes |
| FP31 | 55.91 | 93 | n/a | n/a | n/a | yes |
| FP32 | 53.89 | 75 | n/a | n/a | n/a | yes |
| FP33 | 50.94 | 64 | n/a | n/a | n/a | yes |
| FP34 | 55.77 | 92 | n/a | n/a | n/a | yes |
| FP35 | 54.98 | 90 | n/a | n/a | n/a | yes |
| FP36 | 54.61 | 78 | n/a | n/a | n/a | yes |
| FP37 | 53.96 | 90 | n/a | n/a | n/a | yes |
| FP38 | 56.55 | 95 | n/a | n/a | n/a | yes |
| FP39 | 46.11 | 86.77 | n/a | n/a | n/a | sc (single |
| | | | | | | cut) |
| FP40 | n/a | n/a | n/a | n/a | n/a | yes |
| FP41 | 52.31 | 75.25 | n/a | n/a | n/a | yes |
| FP42 | 47.76 | 66.25 | n/a | n/a | n/a | yes |
| FP43 | 51.13 | 64.85 | n/a | n/a | n/a | yes |
| FP44 | 47.52 | 53.3 | n/a | n/a | n/a | yes |
| FP45 | 49.07 | 48.07 | n/a | n/a | n/a | yes |
| FP46 | n/a | n/a | n/a | n/a | n/a | yes |
| FP47 | 43.62 | 50.14 | n/a | n/a | n/a | sc (single |
| | | | | | | cut) |
| FP48 | 51.66 | 62.17 | n/a | n/a | n/a | yes |
| FP49 | n/a | n/a | n/a | n/a | n/a | yes |
| FP50 | n/a | n/a | n/a | n/a | n/a | yes |
| FP51 | 45.76 | 51.32 | n/a | n/a | n/a | yes |
| FP52 | n/a | n/a | n/a | n/a | n/a | yes |
| FP53 | 42.8 | 38.83 | n/a | n/a | n/a | yes |
| FP54 | 39.66 | 79.01 | n/a | n/a | n/a | sc (single |
| | | | | | | cut) |
| FP55 | 45.64 | 47.12 | n/a | n/a | n/a | sc (single |
| | | | | | | cut) |
| FP56 | n/a | n/a | n/a | n/a | n/a | yes |
| FP57 | 47.83 | 72.47 | n/a | n/a | n/a | yes |
| FP58 | 45.93 | 61.23 | n/a | n/a | n/a | yes |
| FP59 | 40.92 | 19.87 | n/a | n/a | n/a | sc (single |
| | | | | | | cut) |
| FP60 | 51.11 | 58.4 | n/a | n/a | n/a | yes |
| FP61 | 45.47 | 65.08 | n/a | n/a | n/a | sc (single |
| | | | | | | cut) |
| FP62 | n/a | n/a | n/a | n/a | n/a | yes |
| FP63 | 55.42 | 81.61 | n/a | n/a | n/a | sc (single |
| | | | | | | cut) |
| FP64 | 49.84 | 79.53 | n/a | n/a | n/a | yes |
| FP65 | 53.97 | 70.99 | n/a | n/a | n/a | sc (single |
| | | | | | | cut) |
| FP66 | 51.77 | 59.81 | n/a | n/a | n/a | yes |
| FP67 | 52.52 | 58.54 | n/a | n/a | n/a | yes |
| FP68 | n/a | n/a | n/a | n/a | n/a | yes |
| FP69 | 48.28 | 72.31 | n/a | n/a | n/a | sc (single |
| | | | | | | cut) |
| FP70 | n/a | n/a | n/a | n/a | n/a | yes |
| FP71 | n/a | n/a | n/a | n/a | n/a | yes |
| FP72 | n/a | n/a | n/a | n/a | n/a | yes |
| FP73 | 48.36 | 83.79 | n/a | n/a | n/a | yes |
| FP74 | 50.41 | 64.65 | n/a | n/a | n/a | sc (single |
| | | | | | | cut) |
| FP75 | n/a | n/a | n/a | n/a | n/a | yes |
| FP76 | 46.44 | 77.77 | n/a | n/a | n/a | sc (single |
| | | | | | | cut) |
| FP77 | n/a | n/a | n/a | n/a | n/a | yes |
| FP78 | 50.7 | 75.93 | n/a | n/a | n/a | yes |
| FP79 | 48.78 | 81.47 | n/a | n/a | n/a | sc (single |
| | | | | | | cut) |
| FP80 | 46.41 | 57.11 | n/a | n/a | n/a | yes |
| FP81 | 47.55 | 59 | n/a | n/a | n/a | yes |
| FP82 | n/a | n/a | n/a | n/a | n/a | yes |
| FP83 | 48.79 | 80.48 | n/a | n/a | n/a | yes |
| FP84 | 50.4 | 80.83 | n/a | n/a | n/a | yes |
| FP85 | 50.05 | 70.71 | n/a | n/a | n/a | yes |
| FP86 | 49.19 | 74.51 | n/a | n/a | n/a | yes |
| FP87 | n/a | n/a | n/a | n/a | n/a | yes |
| FP88 | 44.36 | 78.75 | n/a | n/a | n/a | yes |
| FP89 | 46.74 | 91.07 | n/a | n/a | n/a | sc (single |
| | | | | | | cut) |
| FP90 | 54.77 | 84.4 | n/a | n/a | n/a | yes |
| FP91 | 43.65 | 68.57 | n/a | n/a | n/a | sc (single |
| | | | | | | cut) |
| FP92 | 49.13 | 80.57 | n/a | n/a | n/a | yes |
| FP93 | 46.22 | 81.14 | n/a | n/a | n/a | yes |
| FP94 | 44.59 | 63.85 | n/a | n/a | n/a | yes |
| FP95 | 45.01 | 85.93 | n/a | n/a | n/a | sc (single |
| | | | | | | cut) |
| FP96 | 47.27 | 84.16 | n/a | n/a | n/a | yes |
| FP97 | n/a | n/a | n/a | n/a | n/a | yes |
| FP98 | 53.69 | 87.87 | n/a | n/a | n/a | yes |
| FP99 | 51.85 | 87.13 | n/a | n/a | n/a | yes |
| FP100 | 48.76 | 82.09 | n/a | n/a | n/a | yes |
| FP101 | 47.86 | 75.61 | n/a | n/a | n/a | yes |
| FP102 | n/a | n/a | n/a | n/a | n/a | yes |
| FP103 | 44.96 | 82.2 | n/a | n/a | n/a | yes |
| FP104 | not detected | 93.27 | n/a | n/a | n/a | yes |
| FP105 | 47.19 | 88.1 | n/a | n/a | n/a | yes |
| FP106 | n/a | n/a | n/a | n/a | n/a | yes |
| FP107 | 48.9 | 84.2 | n/a | n/a | n/a | yes |
| FP108 | 47.33 | 86.41 | n/a | n/a | n/a | yes |
| FP109 | n/a | n/a | n/a | n/a | n/a | yes |
| FP110 | 49.59 | 91.71 | n/a | n/a | n/a | yes |
| FP111 | 47.48 | 94.06 | n/a | n/a | n/a | yes |
| FP112 | n/a | n/a | n/a | n/a | n/a | yes |
| FP113 | 50 | 80.89 | n/a | n/a | n/a | yes |
| FP114 | 54.04 | 79.22 | n/a | n/a | n/a | yes |
| FP115 | 48.59 | 69.64 | n/a | n/a | n/a | sc (single |
| | | | | | | cut) |
| FP116 | 51.19 | 63.46 | n/a | n/a | n/a | yes |
| FP117 | n/a | n/a | n/a | n/a | n/a | yes |
| FP118 | 48.14 | 80.51 | n/a | n/a | n/a | yes |
| FP119 | 53.38 | 85.61 | n/a | n/a | n/a | yes |
| FP120 | 54.65 | 87.12 | n/a | n/a | n/a | yes |
| FP121 | 55.43 | 86.16 | 0.00122 | n/a | 0.001245 | yes |
| FP122 | 55.9 | 87 | n/a | n/a | n/a | yes |
| FP123 | 52.1 | 80.77 | n/a | n/a | n/a | yes |
| FP124 | 53.61 | 84.82 | n/a | n/a | n/a | yes |
| FP125 | 51.18 | 71.23 | n/a | n/a | n/a | yes |
| FP126 | 53.03 | 89.59 | n/a | n/a | n/a | yes |
| FP127 | 53.75 | 81.5 | n/a | n/a | n/a | yes |
| FP128 | 55.81 | 83.45 | n/a | n/a | n/a | yes |
| FP129 | 51.75 | 87.66 | n/a | n/a | n/a | yes |
| FP130 | 58.32 | 93.42 | n/a | n/a | n/a | yes |
| FP131 | 53.63 | 84.33 | n/a | n/a | n/a | yes |
| FP132 | 55.14 | 91 | 0.00127 | n/a | n/a | yes |
| FP133 | 52.37 | 99 | 0.00115 | n/a | n/a | yes |
| FP134 | 52 | 80 | 0.00236 | n/a | n/a | yes |
| FP135 | n/a | 78.58 | n/a | n/a | n/a | n/a |
| FP136 | 52.36 | 98 | 0.00061 | n/a | n/a | yes |
| FP137 | 52.54 | 94 | 0.00128 | n/a | n/a | yes |
| FP138 | n/a | 76.76 | n/a | n/a | n/a | n/a |
| FP139 | 53.16 | 95 | 0.00011 | n/a | n/a | yes |
| FP140 | 53.74 | 98 | 0.00043 | n/a | 0.001353 | yes |
| FP141 | 55.3 | 90 | 0.00075 | n/a | 0.0008745 | yes |
| FP142 | 55.37 | 95 | 0.0038 | n/a | | yes |
| FP143 | 53.17 | 96 | 0.000035 | n/a | 0.001629 | yes |
| FP144 | 53.64 | 98 | 0.00066 | n/a | n/a | yes |
| FP145 | 55.08 | 98 | 0.00145 | n/a | 0.0006542 | yes |
| FP146 | 51.84 | 97 | 0.00158 | n/a | n/a | yes |
| FP147 | 56.61 | 98 | 0.0031 | n/a | n/a | sc (single |
| | | | | | | cut) |
| FP148 | n/a | n/a | n/a | n/a | n/a | n/a |
| FP149 | 52.05 | 97 | 0.00019 | n/a | 0.0007076 | yes |
| FP150 | 53.66 | 93 | 0.00115 | n/a | 0.002203 | yes |
| FP151 | 51.94 | 81.85 | n/a | n/a | n/a | n/a |
| FP152 | n/a | 97.69 | n/a | n/a | n/a | n/a |
| FP153 | n/a | 83.75 | n/a | n/a | n/a | n/a |
| FP154 | n/a | 83.16 | n/a | n/a | n/a | n/a |
| FP155 | n/a | 75.01 | n/a | n/a | n/a | n/a |
| FP156 | n/a | 84.01 | n/a | n/a | n/a | n/a |
| FP157 | n/a | 71.45 | n/a | n/a | n/a | n/a |
| FP158 | 51.74 | 97 | 0.0002 | n/a | n/a | yes |
| FP159 | 51.69 | 95 | 0.00245 | n/a | n/a | yes |
| FP160 | 46.09 | 91 | 0.00404 | n/a | n/a | yes |
| FP161 | n/a | 93.62 | n/a | n/a | n/a | n/a |
| FP162 | 53.81 | 69.64 | n/a | n/a | n/a | n/a |
| FP163 | 56.21 | 72.11 | 0.0305 | n/a | n/a | n/a |
| FP164 | 54.75 | 74.27 | 0.0174 | n/a | n/a | n/a |
| FP165 | 55.3 | 95 | 0.0293 | n/a | 0.0008219 | yes |
| FP166 | n/a | n/a | n/a | n/a | n/a | n/a |
| FP167 | 55.3 | 96 | n/a | n/a | 0.000721 | yes |
| FP168 | 55.3 | 95 | 0.0176 | n/a | 0.0006368 | yes |
| FP169 | n/a | n/a | n/a | n/a | n/a | n/a |
| FP170 | 56.31 | 98 | 0.0146 | n/a | 0.001018 | yes |
| FP171 | 56.39 | 95 | 0.0178 | n/a | 0.00135 | yes |
| FP172 | n/a | n/a | n/a | n/a | n/a | n/a |
| FP173 | n/a | n/a | n/a | n/a | n/a | n/a |
| FP174 | 56.37 | 97 | 0.0122 | n/a | 0.000511 | yes |
| FP175 | 56.62 | 98 | 0.179 | n/a | 0.001875 | yes |
| FP176 | n/a | n/a | n/a | n/a | n/a | n/a |
| FP177 | n/a | n/a | n/a | n/a | n/a | n/a |
| FP178 | 53.6 | 99 | 0.00261 | n/a | 0.0003171 | yes |
| FP179 | 56 | 97 | 0.00664 | n/a | 0.0004236 | yes |
| FP180 | n/a | n/a | n/a | n/a | n/a | n/a |
| FP181 | n/a | n/a | n/a | n/a | n/a | n/a |
| FP182 | n/a | n/a | n/a | n/a | n/a | n/a |
| FP183 | 56.6 | 98 | 0.00763 | n/a | 0.0005482 | yes |
| FP184 | 56.7 | 99 | n/a | n/a | 0.0004748 | yes |
| FP185 | n/a | n/a | n/a | n/a | n/a | n/a |
| FP186 | n/a | n/a | n/a | n/a | n/a | n/a |
| FP187 | n/a | n/a | n/a | n/a | n/a | n/a |
| FP188 | n/a | n/a | n/a | n/a | n/a | n/a |
| FP189 | n/a | n/a | n/a | n/a | n/a | n/a |
| FP190 | n/a | n/a | n/a | n/a | n/a | n/a |
| FP191 | 56.7 | 97 | 0.001506 | n/a | 0.0005555 | yes |

### Example 16: Pharmacokinetics (PK) and Pharmacodynamics (PD) of IgE Cleaving Protease by Intravenous and Subcutaneous Injection to Cynomolgus Monkeys

[0219] Cynomolgus monkeys were injected with single intravenous injections of human IgE cleaving protease (FP183) at doses 0.1 mg/kg and 1 mg/kg. Blood samples were collected at defined timepoints and serum was separated. PK (Table 11) and PD (Table 12) was determined using MSD-based assays on serum samples.

TABLE 11
Pharmacokinetics.

| Time after | | | | | | |
|---|---|---|---|---|---|---|
| dosing (days) | 0.1 mpk | | | 1 mpk | | |
| 1.02 | 3241.8 | 3534.8 | 3828 | 45891.8 | 41185.1 | 50995.5 |
| 1.25 | 1767.5 | 1896.6 | 2351.2 | 29060 | 22798 | 30686.3 |
| 2 | 889.2 | 1439 | 1393.3 | 11952.6 | 11007.5 | 13622.4 |
| 3 | 739.3 | 528.7 | 832.8 | 10844.6 | 9440.5 | 11834.5 |
| 4 | 497.3 | 560.6 | 753 | 7739.9 | 7083.3 | 8892.8 |
| 5 | 483.6 | 617.1 | 461.9 | 7034.1 | 6056.3 | 7909.2 |
| 8 | 304.6 | 236.2 | 303.8 | 5425.1 | 4382.2 | 4960.1 |
| 10 | 400.4 | 323.8 | 480.8 | 4558.7 | 3550.2 | 3253.6 |

TABLE 12
Pharmacodynamics.

| | | | |
|---|---|---|---|
| Days | Vehicle | 0.1 mpk | 1 mpk |

| | | | | | | | | | |
|---|---|---|---|---|---|---|---|---|---|
| −3.00 | 100.00 | 100.00 | 100.00 | 100.00 | 100.00 | 100.00 | 100.00 | 100.00 | 100.00 |
| 1.02 | 81.72 | 128.93 | 117.63 | 3.19 | 4.02 | 4.95 | 5.05 | 0.49 | 0.51 |
| 1.25 | 98.53 | 149.53 | 146.06 | 1.36 | 1.44 | 2.39 | 1.29 | 0.41 | 0.05 |
| 2.00 | 83.60 | 132.63 | 132.11 | 0.00 | 0.00 | 0.00 | 0.00 | 0.00 | 0.00 |
| 3.00 | 74.02 | 101.61 | 119.66 | 1.24 | 0.22 | 0.00 | 0.00 | 0.00 | 0.00 |
| 4.00 | 88.44 | 109.49 | 160.57 | 4.47 | 5.55 | 1.36 | 0.00 | 0.00 | 0.00 |
| 5.00 | 124.07 | 112.20 | 138.41 | 20.31 | 9.32 | 0.00 | 0.00 | 0.00 | 0.00 |
| 8.00 | 154.25 | 53.78 | 107.79 | 46.70 | 28.16 | 28.94 | 2.53 | 0.00 | 0.00 |
| 10.00 | 160.02 | 46.59 | 113.42 | 74.07 | 56.11 | 50.40 | 9.19 | 0.00 | 0.00 |

[0220] FP183 showed dose linear exposure and rapid reduction of cyno soluble IgE at both doses.

### Example 17

[0221] Binding ability of FP183, FP178, and FP179 to Clq was evaluated via enzyme-linked immunoassay. As shown in FIG. 29, test articles displayed no binding to Clq.

[0222] The disclosures of each and every patent, patent application, and publication cited herein are hereby incorporated herein by reference in their entirety. While various embodiments have been disclosed with reference to specific aspects, it is apparent that other aspects and variations of these embodiments may be devised by others skilled in the art without departing from the true spirit and scope of the embodiments. The appended claims are intended to be construed to include all such aspects and equivalent variations.

1-78. (canceled)

79. A polypeptide having IgE protease activity, wherein the polypeptide:
a) has at least 85% identity to SEQ ID NO: 1;
b) comprises:
i) a cysteine (C) at a position in the polypeptide that corresponds to position 125 of SEQ ID NO: 1;
ii) a histidine (H) at a position in the polypeptide that corresponds to position 283 of SEQ ID NO: 1;
iii) an aspartic acid (D) at a position in the polypeptide that corresponds to position 305 of SEQ ID NO: 1; and
iv) at least one mutation in the polypeptide as compared to SEQ ID NO: 1 that corresponds to position 68, 71, 75, 79, 84, 86, 88, 91, 93, 94, 102, 112, 115, 116, 117, 120, 122, 125, 126, 128, 139, 142, 143, 148, 149, 150, 152, 153, 160, 162, 164, 165, 166, 167, 174, 175, 177_183, 180, 182, 183, 185, 189, 196, 197, 199, 200_202, 201, 205, 206, 212, 219, 220, 221, 222, 224, 228, 229, 232, 233, 241, 242, 243, 244, 250, 251, 252, 254, 260, 262, 263, 268, 270, 271_287, 274, 275, 276, 279, 280, 281, 282, 293, 294, 295, 297, 301, 303, 303_326, 306, 307_322, 308_324, 309, 310, 310_320, 311_319, 311_321, 313, 314, 315_317, 316, 318, 319, 320, 324, 327, 329, 332, 333, 336, 343, 346, 347, 348, 351, 360, 363, 364, 366, 374, and 380 of SEQ ID NO: 1.

80. The polypeptide of claim 79, wherein the polypeptide comprises:
an aspartic acid (D) at a position in the polypeptide that corresponds to position 307 of SEQ ID NO: 1; and/or
a lysine (K) at a position in the polypeptide that corresponds to position 115 of SEQ ID NO: 1.

81. The polypeptide of claim 79, wherein the polypeptide comprises the amino acid sequence having the formula of:
(SEQ ID NO: 917)
X₁TALGRRKAEDRIKETLWADGVKIDEKDFEHIX₉₃SSHEDYFAVEY
GKGSGYYDVNKKMDSEDX₁₂₂ALCVGX₁₂₈VVTNMFHWWVX₁₃₉QNREN
IEKFKX₁₅₀QDX₁₅₃ENNGVMKFX₁₆₂GVKEATVDELNX₁₇₄FYX₁₇₇YAD
QSRFFDLIKX₁₉₆HFX₁₉₉NKALNPEELFELYFNGFYYX₂₁₉SSX₂₂₂RY
IEDNX₂₂₉PAQNNLFSKVLX₂₄₁NNKLLNPERSYGIDGFSNNVX₂₆₂NA
LKSHKVLGLVX₂₇₅TTPLX₂₈₀YRHIISMWGADIDQDGKVKAIYVTDS
DDREITFNDNSKRRIGMX₃₂₄RYDVLVDDX₃₃₃GNIRFTGKGX₃₄₃THK
EEGAIYAGLYSLSX₃₆₀GDEVWEDYFKKYPEVQENLX₃₈₀,
wherein:
at least one X₉₃, X₁₂₂, X₁₂₈, X₁₃₉, X₁₅₀, X₁₅₃, X₁₆₂, X₁₇₄, X₁₇₇, X₁₉₆, X₁₉₉, X₂₁₉, X₂₂₂, X₂₂₉, X₂₄₁, X₂₆₂, X₂₇₅, X₂₈₀, X₃₂₄, X₃₃₃, X₃₄₃, and X₃₆₀ is mutated as compared to SEQ ID NO: 1,
X₃₈₀ comprises the amino acid sequence having the formula as set forth in SEQ ID NO: 744 or is absent, and
X₁ comprises the amino acid sequence of SEQ ID NO: 248, or is absent.

82. The polypeptide of claim 81, wherein X₁₂₈ is alanine (A), X₁₅₃ is proline (P), X₁₆₂ is glutamic acid (E), X₂₂₉ is glutamic acid (E), X₃₂₄ is isoleucine (I), and X₃₃₃ is asparagine (N).

83. The polypeptide of claim 81, wherein X₁₂₈ is alanine (A), X₁₅₃ is proline (P), X₁₆₂ is glutamic acid (E), X₁₇₄ is glutamic acid (E), X₁₇₇ is an amino acid sequence RDNRDN (SEQ ID NO: 743), X₂₁₉ is glycine (G), X₂₂₉ is glutamic acid (E), X₂₇₅ is tyrosine (Y), X₃₂₄ is isoleucine (I), and X₃₃₃ is asparagine (N).

84. The polypeptide of claim 81, wherein X₉₃ is aspartic acid (D), X₁₂₂ is serine(S), X₁₂₈ is alanine (A), X₁₅₀ is glutamic acid (E), X₁₅₃ is proline (P), X₁₆₂ is glutamic acid (E), X₁₇₄ is glutamic acid (E), X₁₇₇ is an amino acid sequence RDNRDN (SEQ ID NO: 743), X₁₉₉ is proline (P), X₂₁₉ is glycine (G), X₂₂₉ is glutamic acid (E), X₂₄₁ is aspartic acid (D), X₂₇₅ is tyrosine (Y), X₃₂₄ is isoleucine (I), and X₃₃₃ is asparagine (N).

85. The polypeptide of claim 81, wherein X₉₃ is aspartic acid (D), X₁₂₂ is serine(S), X₁₂₈ is alanine (A), X₁₃₉ is glutamic acid (E), X₁₅₀ is glutamic acid (E), X₁₅₃ is proline (P), X₁₆₂ is glutamic acid (E), X₁₇₄ is glutamic acid (E), X₁₇₇ is an amino acid sequence RDNRDN (SEQ ID NO: 743), X₁₉₆ is serine(S), X₁₉₉ is proline (P), X₂₁₉ is glycine (G), X₂₂₂ is glutamine (Q), X₂₂₉ is glutamic acid (E), X₂₄₁ is aspartic acid (D), X₂₆₂ is lysine (K), X₂₇₅ is tyrosine (Y), X₂₈₀ is threonine (T), X₃₂₄ is isoleucine (I), X₃₃₃ is asparagine (N), X₃₄₃ is lysine (K), and X₃₆₀ is leucine (L).

86. The polypeptide of claim 79, wherein the polypeptide comprises an amino acid sequence having at least 95%, identity to an amino acid sequence of SEQ ID NOs: 380, 251, 5-243, 247, 280-379, 381-528, 737, 745-823, 828-864, or 885-916.

87. The polypeptide of claim 79, wherein the polypeptide comprises the amino acid sequence of any one of SEQ ID NO: 380, 251, 5-243, 247, 280-379, 381-528, 737, 745-823, 828-864, or 885-916.

88. The polypeptide of claim 79, wherein the polypeptide does not comprise the contiguous sequence of amino acid residues 1-52 (1_52del) or 1-61 (1_61del) of SEQ ID NO: 1.

89. The polypeptide of claim 79, wherein the polypeptide does not comprise contiguous sequence of amino acid residues 380-529 (380_529del) of SEQ ID NO: 1.

90. The polypeptide of claim 79, wherein the polypeptide does not comprise the contiguous sequence of amino acid residues 1-52 and 380-529 of SEQ ID NO: 1.

91. The polypeptide of claim 79, wherein the polypeptide does not comprise the contiguous sequence of amino acid residues 1-61 and 380-529 of SEQ ID NO: 1.

92. The polypeptide of claim 79, wherein the polypeptide is more selective at cleaving IgE as compared to IgG.

93. The polypeptide of claim 79, wherein the polypeptide comprises any one of mutation sets as set forth in Table 3A or Table 3B as compared to SEQ ID NO: 1.

94. The polypeptide of claim 79, wherein the polypeptide comprises a Fc domain linked to the N-terminus or the C-terminus of the polypeptide.

95. The polypeptide of claim 94, wherein the Fc domain comprises an amino acid sequence that is least 95% identical to the amino acid sequence of SEQ ID NO: 255, SEQ ID NO: 721, SEQ ID NO: 724, SEQ ID NO: 725, SEQ ID NO: 256, or SEQ ID NO: 273.

96. The polypeptide of claim 94, wherein the Fc domain comprises the amino acid sequence of SEQ ID NO: 255, SEQ ID NO: 721, SEQ ID NO: 724, SEQ ID NO: 725, SEQ ID NO: 256, or SEQ ID NO: 273.

97. The polypeptide of claim 94, wherein the polypeptide comprises an amino acid sequence that is least 95% identical to the amino acid sequence of any one of SEQ ID NOs: 257, 258, 259, or 529-720.

98. The polypeptide of claim 94, wherein the polypeptide comprises the amino acid sequence of any one of SEQ ID NOs: 257, 258, 259, or 529-720.

99. A polypeptide comprising:
a first polypeptide comprising the polypeptide of claim 79 linked to an Fc domain;
and a second polypeptide comprising a second Fc domain.

100. The polypeptide of claim 99, wherein:
the first Fc domain comprises a Fc domain comprising an amino acid sequence that is at least 95% identical to SEQ ID NO: 255, SEQ ID NO: 721, SEQ ID NO: 724, SEQ ID NO: 725, SEQ ID NO: 256, or SEQ ID NO: 273; and
the second Fc domain comprises a Fc domain comprising an amino acid sequence that is at least 95% identical to SEQ ID NO: 253, 254, or 722.

101. The polypeptide of claim 100, wherein:
the first Fc domain comprises a Fc domain comprising the amino acid sequence of SEQ ID NO: 255, SEQ ID NO: 721, SEQ ID NO: 724, SEQ ID NO: 725, SEQ ID NO: 256, or SEQ ID NO: 273; and
the second Fc domain comprises a Fc domain comprising the amino acid sequence of SEQ ID NO: 253, 254, or 722.

102. The polypeptide of claim 99, wherein:
the first polypeptide comprises an amino acid sequence that is least 95% identical to the amino acid sequence of any one of SEQ ID NOs: 257, 258, 259, or 529-720; and
the second polypeptide comprises an amino acid sequence that is at least 95% identical to SEQ ID NO: 253, SEQ ID NO: 254, or SEQ ID NO: 722.

103. The polypeptide of claim 102, wherein the first polypeptide comprises the amino acid sequence of any one of SEQ ID NOs: 257, 258, 259, or 529-720.

104. The polypeptide of claim 103, wherein the second polypeptide comprises the amino acid sequence of SEQ ID NO: 253, SEQ ID NO: 254, or SEQ ID NO: 722.

105. A pharmaceutical composition comprising the polypeptide of claim 79 and a pharmaceutically acceptable excipient.

106. A pharmaceutical composition comprising the polypeptide of claim 95 and a pharmaceutically acceptable excipient.

107. A method of reducing IgE immunoglobulins in a subject, the method comprising administering a pharmaceutical composition comprising the polypeptide of claim 79 to the subject to reduce IgE immunoglobulins in the subject.

108. A method of reducing IgE immunoglobulins in a subject, the method comprising administering a pharmaceutical composition comprising the polypeptide of claim 95 to the subject to reduce IgE immunoglobulins in the subject.

The application's sequence listing, which the Patent Office published only in electronic form, follows.

SEQUENCE LISTING (946 sequences)

SEQ ID NO: 1 - protein, 529 aa, synthetic construct
MKKQSFTHSRKPKFGMRKLSIGLASCMLGMMFLTTGHVNADDVDHVGETITVVPWQRNNLDTALGRRKAEDRIKETLWADGVKIDEKDFEHIKSSHEDYFAVEYGKGSGYYDVNKKMDSEDTALCVGSVVTNMFHWWVDQNRENIEKFKKQDLENNGVMKFNGVKEATVDELNHFYKEYQSNKYADQSRFFDLIKKHFGNKALNPEELFELYFNGFYYNSSHRYIEDNKPAQNNLFSKVLENNKLLNPERSYGIDGFSNNVINALKSHKVLGLVHTTPLRYRHIISMWGADIDQDGKVKAIYVTDSDDREITFNDNSKRRIGMKRYDVLVDDFGNIRFTGKGATHKEEGAIYAGLYSLSRGDEVWEDYFKKYPEVQENLENNVADSNKNSEDVEVSSVEFDFLNFKYPKNEDQVSTEDMRLTLKDTNVFNQPQVKISFEEQNGNDWKEKDSGTFEEGKKYRLKIDVNKLALKIYGHLSKNKLNVIVNGKAVNIQNVVKKDSIETSFTIYSDSIDLEKINYWTDSFNNWS

SEQ ID NO: 2 - protein, 520 aa, synthetic construct
MRKLSIGLASCMLGMMFLTTSHVSGEVVEVWPYGQNPHSGTIGVDPGQQNLDTALGRRKAEERIKETLWVDGVKIDEKDFEHMSSSHEDYFAAEYGKGSGYYDVNKKMDSGDSALCVASVVTNMFHWWVDQNRDNIEKFKKQDIENNGVMKFNGVRQTTVDELNHFYKEYNSNKYADQSKFFDLIKSHFGNRALNPEELFELYFNGFYYNSSQRYIEDNKPAQNNLFSKVLENNKLLNPERSYGIDGFSNNVINALKSHKVLGLVHTTPLRYRHIISMWGADIDQDGKVKAIYVTDSDDREITFNDNSKRRIGMKRYDVLVDDFGNIRFTGKGATHKEEGAIYAGLYSLSRGDEVWEDYFKKYPEVQENLENNVADSNKNSEDVEVSSVEFDFLNFKYPKNEDQVSTEDMRLTLKDTNVFNQPQVKISFEEQNGNDWKEKDSGTFEEGKKYRLKIDVNKLALKIYGHLSKNKLNVIVNGKAVNIQNVVKKDSIETSFTIYSDSIDLEKINYWTDSFNNWS

SEQ ID NO: 3 - protein, 319 aa, synthetic construct
  VARIANT 1: note = M or absent or a signal peptide linked via a peptide bond
XTALGRRKAEDRIKETLWADGVKIDEKDFEHIKSSHEDYFAVEYGKGSGYYDVNKKMDSEDTALCVGSVVTNMFHWWVDQNRENIEKFKKQDLENNGVMKFNGVKEATVDELNHFYKEYQSNKYADQSRFFDLIKKHFGNKALNPEELFELYFNGFYYNSSHRYIEDNKPAQNNLFSKVLENNKLLNPERSYGIDGFSNNVINALKSHKVLGLVHTTPLRYRHIISMWGADIDQDGKVKAIYVTDSDDREITFNDNSKRRIGMKRYDVLVDDFGNIRFTGKGATHKEEGAIYAGLYSLSRGDEVWEDYFKKYPEVQENL

SEQ ID NO: 4 - protein, 328 aa, synthetic construct
  VARIANT 1: note = M or absent or a signal peptide linked via a peptide bond
XVPWQRNNLDTALGRRKAEDRIKETLWADGVKIDEKDFEHIKSSHEDYFAVEYGKGSGYYDVNKKMDSEDTALCVGSVVTNMFHWWVDQNRENIEKFKKQDLENNGVMKFNGVKEATVDELNHFYKEYQSNKYADQSRFFDLIKKHFGNKALNPEELFELYFNGFYYNSSHRYIEDNKPAQNNLFSKVLENNKLLNPERSYGIDGFSNNVINALKSHKVLGLVHTTPLRYRHIISMWGADIDQDGKVKAIYVTDSDDREITFNDNSKRRIGMKRYDVLVDDFGNIRFTGKGATHKEEGAIYAGLYSLSRGDEVWEDYFKKYPEVQENL

SEQ ID NO: 5 - protein, 319 aa, synthetic construct
  VARIANT 1: note = M or absent or a signal peptide linked via a peptide bond
XTALGRRKAEDRIKETLWADGVKIDEKDFEHIKSSHEDYFAVEYGKGSGYYDVNKKMDSEDTALCVGAVVTNMFHWWVDQNRENIEKFKKQDPENNGVMKFNGVKEATVDELNHFYKEYQSNKYADQSKFFDLIKKHFGNKALNPEELFELYFNGFYYNSSHRYIEDNKPAQNNLFSKVLENNKLLNPERSYGIDGFSNNVINALKSHKVLGLVHTTPLRYRHIISMWGADIDQDGKVKAIYVTDSDDREITFNDNSKRRIGMKRYDVLVDDFGNIRFTGKGATHKEEGAIYAGLYSLSRGDEVWEDYFKKYPEVQENL

SEQ ID NO: 6 - protein, 319 aa, synthetic construct
  VARIANT 1: note = M or absent or a signal peptide linked via a peptide bond
XTALGRRKAEDRIKETLWADGVKIDEKDFEHIKSSHEDYFAVEYGKGSGYYDVNKKMDSEDTALCVGAVVTNMFHWWVDQNRENIEKFKKQDPENNGVMKFNGVKEATVDELNHFYKEYQSNKYADQSRFFDLIKKHFGNKALNPEELFELYFNGFYYNSSHRYIEDNKPAQNNLFSKVLENNKLLNPERSYGIDGFSNNVINALKSHKVLGLVHTTPLRYRHIISMWGADIDQDGKVKAIYVTDSDDREITFNDNSKRRIGMKRYDVLVDDNGNIRFTGKGATHKEEGAIYAGLYSLSRGDEVWEDYFKKYPEVQENL

SEQ ID NO: 7 - protein, 319 aa, synthetic construct
  VARIANT 1: note = M or absent or a signal peptide linked via a peptide bond
XTALGRRKAEDRIKETLWADGVKIDEKDFEHIKSSHEDYFAVEYGKGSGYYDVNKKMDSEDSALCVGSVVTNMFHWWVDQNRENIEKFKKQDLENNGVMKFNGVKEATVDELNHFYKEYQSNKYADQSRFFDLIKKHFGNKALNPEELFELYFNGFYYNSSHRYIEDNEPAQNNLFSKVLENNKLLNPERSYGIDGFSNNVINALKSHKVLGLVHTTPLRYRHIISMWGADIDQDGKVKAIYVTDSDDREITFNDNSKRRIGMKRYDVLVDDFGNIRFTGKGATHKEEGAIYAGLYSLSRGDEVWEDYFKKYPEVQENL

SEQ ID NO: 8 - protein, 319 aa, synthetic construct
  VARIANT 1: note = M or absent or a signal peptide linked via a peptide bond
XTALGRRKAEDRIKETLWADGVKIDEKDFEHIKSSHEDYFAVEYGKGSGYYDVNKKMDSEDSALCVGSVVTNMFHWWVDQNRENIEKFKKQDPENNGVMKFNGVKEATVDELNHFYKEYQSNKYADQSRFFDLIKKHFGNKALNPEELFELYFNGFYYNSSHRYIEDNKPAQNNLFSKVLENNKLLNPERSYGIDGFSNNVINALKSHKVLGLVHTTPLRYRHIISMWGADIDQDGKVKAIYVTDSDDREITFNDNSKRRIGMKRYDVLVDDFGNIRFTGKGATHKEEGAIYAGLYSLSRGDEVWEDYFKKYPEVQENL

SEQ ID NO: 9 - protein, 319 aa, synthetic construct
  VARIANT 1: note = M or absent or a signal peptide linked via a peptide bond
XTALGRRKAEDRIKETLWADGVKIDEKDFEHIKSSHEDYFAVEYGKGSGYYDVNKKMDSEDSALCVGSVVTNMFHWWVDQNRENIEKFKKQDPENNGVMKFNGVKEATVDELNHFYKEYQSNKYADQSKFFDLIKKHFGNKALNPEELFELYFNGFYYNSSHRYIEDNKPAQNNLFSKVLENNKLLNPERSYGIDGFSNNVINALKSHKVLGLVHTTPLRYRHIISMWGADIDQDGKVKAIYVTDSDDREITFNDNSKRRIGMKRYDVLVDDFGNIRFTGKGATHKEEGAIYAGLYSLSRGDEVWEDYFKKYPEVQENL

SEQ ID NO: 10 - protein, 319 aa, synthetic construct
  VARIANT 1: note = M or absent or a signal peptide linked via a peptide bond
XTALGRRKAEDRIKETLWADGVKIDEKDFEHIKSSHEDYFAVEYGKGSGYYDVNKKMDSEDSALCVGAVVTNMFHWWVDQNRENIEKFKKQDPENNGVMKFNGVKEATVDELNHFYKEYQSNKYADQSRFFDLIKKHFGNKALNPEELFELYFNGFYYNSSHRYIEDNKPAQNNLFSKVLENNKLLNPERSYGIDGFSNNVINALKSHKVLGLVHTTPLRYRHIISMWGADIDQDGKVKAIYVTDSDDREITFNDNSKRRIGMKRYDVLVDDFGNIRFTGKGATHKEEGAIYAGLYSLSRGDEVWEDYFKKYPEVQENL

SEQ ID NO: 11 - protein, 319 aa, synthetic construct
  VARIANT 1: note = M or absent or a signal peptide linked via a peptide bond
XTALGRRKAEDRIKETLWADGVKIDEKDFEHIKSSHEDYFAVEYGKGSGYYDVNKKMDSEDSALCSGSVVTNMFHWWVDQNRENIEKFKKQDPENNGVMKFNGVKEATVDELNHFYKEYQSNKYADQSRFFDLIKKHFGNKALNPEELFELYFNGFYYNSSHRYIEDNKPAQNNLFSKVLENNKLLNPERSYGIDGFSNNVINALKSHKVLGLVHTTPLRYRHIISMWGADIDQDGKVKAIYVTDSDDREITFNDNSKRRIGMKRYDVLVDDFGNIRFTGKGATHKEEGAIYAGLYSLSRGDEVWEDYFKKYPEVQENL

SEQ ID NO: 12 - protein, 319 aa, synthetic construct
  VARIANT 1: note = M or absent or a signal peptide linked via a peptide bond
XTALGRRKAEDRIKETLWADGVKIDEKDFEHIKSSHEDYFAVEYGKGSGYYDVNKKMDSEDSALCVGAVVTNMFHWWVDQNRENIEKFKKQDLENNGVMKFNGVKEATVDELNHFYKEYQSNKYADQSRFFDLIKKHFGNKALNPEELFELYFNGFYYNSSHRYIEDNKPAQNNLFSKVLENNKLLNPERSYGIDGFSNNVINALKSHKVLGLVHTTPLRYRHIISMWGADIDQDGKVKAIYVTDSDDREITFNDNSKRRIGMKRYDVLVDDNGNIRFTGKGATHKEEGAIYAGLYSLSRGDEVWEDYFKKYPEVQENL

SEQ ID NO: 13 - protein, 319 aa, synthetic construct
  VARIANT 1: note = M or absent or a signal peptide linked via a peptide bond
XTALGRRKAEDRIKETLWADGVKIDEKDFEHIKSSHEDYFAVEYGKGSGYYDVNKKMDSEDTALCVGSVVTNMFHWWVDQNRENIEKFKKQDLENNGVMKFNGVKQATVDELNHFYKEYQSNKYADQSRFFDLIKKHFGNKALNPEELFELYFNGFYYNSSHRYIEDNKPAQNNLFSKVLENNKLLNPERSYGIDGFSNNVINALKSHKVLGLVHTTPLRYRHIISMWGADIDQDGKVKAIYVTDSDDREITFNDNSKRRIGMKRYDVLVDDFGNIRFTGKGATHKEEGAIYAGLYSLSRGDEVWEDYFKKYPEVQENL

SEQ ID NO: 14 - protein, 319 aa, synthetic construct
  VARIANT 1: note = M or absent or a signal peptide linked via a peptide bond
XTALGRRKAEDRIKETLWADGVKIDEKDFEHIKSSHEDYFAVEYGKGSGYYDVNKKMDSEDTALCVGSVVTNMFHWWVDQNRENIEKFKKQDLENNGVMKFNGVKEATVDELNHFYKEYQSNKYADQSRFFDLIKSHFGNKALNPEELFELYFNGFYYNSSHRYIEDNKPAQNNLFSKVLENNKLLNPERSYGIDGFSNNVINALKSHKVLGLVHTTPLRYRHIISMWGADIDQDGKVKAIYVTDSDDREITFNDNSKRRIGMKRYDVLVDDFGNIRFTGKGATHKEEGAIYAGLYSLSRGDEVWEDYFKKYPEVQENL

SEQ ID NO: 15 - protein, 319 aa, synthetic construct
  VARIANT 1: note = M or absent or a signal peptide linked via a peptide bond
XTALGRRKAEDRIKETLWADGVKIDEKDFEHIKSSHEDYFAVEYGKGSGYYDVNKKMDSEDTALCVGSVVTNMFHWWVDQNRENIEKFKKQDLENNGVMKFNGVKEATVDELNHFYKEYQSNKYADQSRFFDLIKEHFGNKALNPEELFELYFNGFYYNSSHRYIEDNKPAQNNLFSKVLENNKLLNPERSYGIDGFSNNVINALKSHKVLGLVHTTPLRYRHIISMWGADIDQDGKVKAIYVTDSDDREITFNDNSKRRIGMKRYDVLVDDFGNIRFTGKGATHKEEGAIYAGLYSLSRGDEVWEDYFKKYPEVQENL

SEQ ID NO: 16 - protein, 319 aa, synthetic construct
  VARIANT 1: note = M or absent or a signal peptide linked via a peptide bond
XTALGRRKAEDRIKETLWADGVKIDEKDFEHIKSSHEDYFAVEYGKGSGYYDVNKKMDSEDTALCVGSVVTNMFHWWVDQNRENIEKFKKQDLENNGVMKFNGVKEATVDELNHFYKEYQSNKYADQSRFFDLIKKHFGNKALNPEELFELYFNGFYYNSSQRYIEDNKPAQNNLFSKVLENNKLLNPERSYGIDGFSNNVINALKSHKVLGLVHTTPLRYRHIISMWGADIDQDGKVKAIYVTDSDDREITFNDNSKRRIGMKRYDVLVDDFGNIRFTGKGATHKEEGAIYAGLYSLSRGDEVWEDYFKKYPEVQENL

SEQ ID NO: 17 - protein, 319 aa, synthetic construct
  VARIANT 1: note = M or absent or a signal peptide linked via a peptide bond
XTALGRRKAEDRIKETLWADGVKIDEKDFEHIKSSHEDYFAVEYGKGSGYYDVNKKMDSGDTALCVGSVVTNMFHWWVDQNRENIEKFKKQDLENNGVMKFNGVKEATVDELNHFYKEYQSNKYADQSRFFDLIKKHFGNKALNPEELFELYFNGFYYNSSHRYIEDNKPAQNNLFSKVLENNKLLNPERSYGIDGFSNNVINALKSHKVLGLVHTTPLRYRHIISMWGADIDQDGKVKAIYVTDSDDREITFNDNSKRRIGMKRYDVLVDDFGNIRFTGKGATHKEEGAIYAGLYSLSRGDEVWEDYFKKYPEVQENL

SEQ ID NO: 18 - protein, 319 aa, synthetic construct
  VARIANT 1: note = M or absent or a signal peptide linked via a peptide bond
XTALGRRKAEDRIKETLWADGVKIDEKDFEHISSSHEDYFAVEYGKGSGYYDVNKKMDSEDTALCVGSVVTNMFHWWVDQNRENIEKFKKQDLENNGVMKFNGVKEATVDELNHFYKEYQSNKYADQSRFFDLIKKHFGNKALNPEELFELYFNGFYYNSSHRYIEDNKPAQNNLFSKVLENNKLLNPERSYGIDGFSNNVINALKSHKVLGLVHTTPLRYRHIISMWGADIDQDGKVKAIYVTDSDDREITFNDNSKRRIGMKRYDVLVDDFGNIRFTGKGATHKEEGAIYAGLYSLSRGDEVWEDYFKKYPEVQENL

SEQ ID NO: 19 - protein, 319 aa, synthetic construct
  VARIANT 1: note = M or absent or a signal peptide linked via a peptide bond
XTALGRRKAEDRIKETLWADGVKIDEKDFEHIKSSHEDYFAVEYGKGSGYYDVNKKMDSEDSALCVGSVVTNMFHWWVDQNRENIEKFKKQDLENNGVMKFNGVKEATVDELNHFYKEYQSNKYADQSRFFDLIKKHFGNKALNPEELFELYFNGFYYNSSHRYIEDNKPAQNNLFSKVLENNKLLNPERSYGIDGFSNNVINALKSHKVLGLVHTTPLRYRHIISMWGADIDQDGKVKAIYVTDSDDREITFNDNSKRRIGMKRYDVLVDDFGNIRFTGKGATHKEEGAIYAGLYSLSRGDEVWEDYFKKYPEVQENL

SEQ ID NO: 20 - protein, 319 aa, synthetic construct
  VARIANT 1: note = M or absent or a signal peptide linked via a peptide bond
XTALGRRKAEDRIKETLWADGVKIDEKDFEHIKSSHEDYFAVEYGKGSGYYDVNKKMDSEDTALCVGSVVTNMFHWWVDQNRENIEKFKKQDLENNGVMKFNGVKEATVDELNHFYKEYQSNKYADQSRFFDLIKKHFGNKALNPEELFELYFNGFYYNSSHRYIEDNEPAQNNLFSKVLENNKLLNPERSYGIDGFSNNVINALKSHKVLGLVHTTPLRYRHIISMWGADIDQDGKVKAIYVTDSDDREITFNDNSKRRIGMKRYDVLVDDFGNIRFTGKGATHKEEGAIYAGLYSLSRGDEVWEDYFKKYPEVQENL

SEQ ID NO: 21 - protein, 319 aa, synthetic construct
  VARIANT 1: note = M or absent or a signal peptide linked via a peptide bond
XTALGRRKAEDRIKETLWADGVKIDEKDFEHIKSSHEDYFAVEYGKGSGYYDVNKKMDSEDTALCVGSVVTNMFHWWVDQNRENIEKFKKQDLENNGVMKFEGVKEATVDELNHFYKEYQSNKYADQSRFFDLIKKHFGNKALNPEELFELYFNGFYYNSSHRYIEDNKPAQNNLFSKVLENNKLLNPERSYGIDGFSNNVINALKSHKVLGLVHTTPLRYRHIISMWGADIDQDGKVKAIYVTDSDDREITFNDNSKRRIGMKRYDVLVDDFGNIRFTGKGATHKEEGAIYAGLYSLSRGDEVWEDYFKKYPEVQENL

SEQ ID NO: 22 - protein, 319 aa, synthetic construct
  VARIANT 1: note = M or absent or a signal peptide linked via a peptide bond
XTALGRRKAEDRIKETLWADGVKIDEKDFEHIKSSHEDYFAVEYGKGSGYYDVNKKMDSEDTALCVGSVVTNMFHWWVDQNRENIEKFKKQDLENNGVMKFNGVKEATVDELNHFYKEYQSNKYADQSRFFDLIKKHFGNKALNPEELFELYFNGFYYNSSHRYIEDNKPAQNNLFSKVLENNKLLNPERSYGIDGFSNNVINALKSHKVLGLVHTTPLEYRHIISMWGADIDQDGKVKAIYVTDSDDREITFNDNSKRRIGMKRYDVLVDDFGNIRFTGKGATHKEEGAIYAGLYSLSRGDEVWEDYFKKYPEVQENL

SEQ ID NO: 23 - protein, 319 aa, synthetic construct
  VARIANT 1: note = M or absent or a signal peptide linked via a peptide bond
XTALGRRKAEDRIKETLWADGVKIDEKDFEHIKSSHEDYFAVEYGKGSGYYDVNKKMDSEDTALCVGSVVTNMFHWWVDQNRENIEKFKKQDLENNGVMKFNGVKEATVDELNHFYKEYQSNKYADQSRFFDLIKKHFGNKALNPEELFELYFNGFYYNSSHRYIEDNKPAQNNLFSKVLENNKLLNPERSYGIDGFSNNVINALKSHKVLGLVHTTPLRYRHIISMWGADIDQDGKVKAIYVTDSDDREITFNDNSGRRIGMKRYDVLVDDFGNIRFTGKGATHKEEGAIYAGLYSLSRGDEVWEDYFKKYPEVQENL

SEQ ID NO: 24 - protein, 319 aa, synthetic construct
  VARIANT 1: note = M or absent or a signal peptide linked via a peptide bond
XTALGRRKAEDRIKETLWADGVKIDEKDFEHIKSSHEDYFAVEYGKGSGYYDVNKKMDSEDTALCVGSVVTNMFHWWVDQNRENIEKFKKQDLENNGVMKFNGVKEATVDELNHFYKEYQSNKYADQSRFFDLIKKHFGNKALNPEELFELYFNGFYYNSSHRYIEDNKPAQNNLFSKVLENNKLLNPERSYGIDGFSNNVINALKSHKVLGLVHTTPLRYRHIISMWGADIDQDGKVKAIYVTDSDDREITFNDNSARRIGMKRYDVLVDDFGNIRFTGKGATHKEEGAIYAGLYSLSRGDEVWEDYFKKYPEVQENL

SEQ ID NO: 25 - protein, 328 aa, synthetic construct
  VARIANT 1: note = M or absent or a signal peptide linked via a peptide bond
XVPWQRNNLDTALGRRKAEDRIKETLWADGVKIDEKDFEHIKSSHEDYFAVEYGKGSGYYDVNKKMDSEDSALCVGAVVTNMFHWWVDQNRENIEKFKKQDPENNGVMKFNGVKEATVDELNHFYKEYQSNKYADQSRFFDLIKKHFGNKALNPEELFELYFNGFYYNSSHRYIEDNKPAQNNLFSKVLENNKLLNPERSYGIDGFSNNVINALKSHKVLGLVHTTPLRYRHIISMWGADIDQDGKVKAIYVTDSDDREITFNDNSKRRIGMKRYDVLVDDFGNIRFTGKGATHKEEGAIYAGLYSLSRGDEVWEDYFKKYPEVQENL

SEQ ID NO: 26 - protein, 319 aa, synthetic construct
  VARIANT 1: note = M or absent or a signal peptide linked via a peptide bond
XTALGRRKAEDRIKETLWADGVKIDEKDFEHIKSSHEDYFAVEYGKGSGYYDVNKKMDSEDSALCVGAVVTNMFHWWVDQNRENIEKFKKQDPENNGVMKFNGVKEATVDELNHFYKEYQSNKYADQSRFFDLIKKHFGNKALNPEELFELYFNGFYYNSSHRYIEDNKPAQNNLFSKVLENNKLLNPERSYGIDGFSNNVINALKSHKVLGLVHTTPLRYRHIISMWGADIDQDGKVKAIYVTDSDDREITFNDNSKRRIGMKRYDVLVDDNGNIRFTGKGATHKEEGAIYAGLYSLSRGDEVWEDYFKKYPEVQENL

SEQ ID NO: 27 - protein, 319 aa, synthetic construct
  VARIANT 1: note = M or absent or a signal peptide linked via a peptide bond
XTALGRRKAEERIKETLWVDGVKIDEKDFEHIKSSHEDYFAVEYGKGSGYYDVNKKMDSEDSALCVGAVVTNMFHWWVDQNRENIEKFKKQDPENNGVMKFNGVKEATVDELNHFYKEYQSNKYADQSRFFDLIKKHFGNKALNPEELFELYFNGFYYNSSHRYIEDNKPAQNNLFSKVLENNKLLNPERSYGIDGFSNNVINALKSHKVLGLVHTTPLRYRHIISMWGADIDQDGKVKAIYVTDSDDREITFNDNSKRRIGMKRYDVLVDDNGNIRFTGKGATHKEEGAIYAGLYSLSRGDEVWEDYFKKYPEVQENL

SEQ ID NO: 28 - protein, 319 aa, synthetic construct
  VARIANT 1: note = M or absent or a signal peptide linked via a peptide bond
XTALGRRKAEDRIKETLWVDGVKIDEKDFEHIKSSHEDYFAVEYGKGSGYYDVNKKMDSEDSALCVGAVVTNMFHWWVDQNRENIEKFKKQDPENNGVMKFNGVKEATVDELNHFYKEYQSNKYADQSKFFDLIKKHFGNKALNPEELFELYFNGFYYNSSHRYIEDNKPAQNNLFSKVLENNKLLNPERSYGIDGFSNNVINALKSHKVLGLVHTTPLRYRHIISMWGADIDQDGKVKAIYVTDSDDREITFNDNSKRRIGMKRYDVLVDDNGNIRFTGKGATHKEEGAIYAGLYSLSRGDEVWEDYFKKYPEVQENL

SEQ ID NO: 29 - protein, 319 aa, synthetic construct
  VARIANT 1: note = M or absent or a signal peptide linked via a peptide bond
XTALGRRKAEDRIKETLWVDGVKIDEKDFEHIKSSHEDYFAVEYGKGSGYYDVNKKMDSEDSALCVGAVVTNMFHWWVDQNRENIEKFKKQDPENNGVMKFNGVKEATVDELNHFYKEYQSNKYADQSRFFDLIKKHFGNKALNPEELFELYFNGFYYNSSQRYIEDNKPAQNNLFSKVLENNKLLNPERSYGIDGFSNNVINALKSHKVLGLVHTTPLRYRHIISMWGADIDQDGKVKAIYVTDSDDREITFNDNSKRRIGMKRYDVLVDDNGNIRFTGKGATHKEEGAIYAGLYSLSRGDEVWEDYFKKYPEVQENL

SEQ ID NO: 30 - protein, 319 aa, synthetic construct
  VARIANT 1: note = M or absent or a signal peptide linked via a peptide bond
XTALGRRKAEDRIKETLWADGVKIDEKDFEHIKSSHEDYFAVEYGKGSGYYDVNKKMDSEDSALCVGAVVTNMFHWWVDQNRENIEKFKKQDPENNGVMKFNGVKEATVDELNHFYKEYQSNKYADQSKFFDLIKKHFGNKALNPEELFELYFNGFYYNSSQRYIEDNKPAQNNLFSKVLENNKLLNPERSYGIDGFSNNVINALKSHKVLGLVHTTPLRYRHIISMWGADIDQDGKVKAIYVTDSDDREITFNDNSKRRIGMKRYDVLVDDNGNIRFTGKGATHKEEGAIYAGLYSLSRGDEVWEDYFKKYPEVQENL

SEQ ID NO: 31 - protein, 319 aa, synthetic construct
  VARIANT 1: note = M or absent or a signal peptide linked via a peptide bond
XTALGRRKAEDRIKETLWVDGVKIDEKDFEHIKSSHEDYFAVEYGKGSGYYDVNKKMDSEDSALCVGAVVTNMFHWWVDQNRENIEKFKKQDPENNGVMKFNGVKETTVDELNHFYKEYQSNKYADQSRFFDLIKKHFGNKALNPEELFELYFNGFYYNSSHRYIEDNKPAQNNLFSKVLENNKLLNPERSYGIDGFSNNVINALKSHKVLGLVHTTPLRYRHIISMWGADIDQDGKVKAIYVTDSDDREITFNDNSKRRIGMKRYDVLVDDNGNIRFTGKGATHKEEGAIYAGLYSLSRGDEVWEDYFKKYPEVQENL

SEQ ID NO: 32 - protein, 319 aa, synthetic construct
  VARIANT 1: note = M or absent or a signal peptide linked via a peptide bond
XTALGRRKAEDRIKETLWVDGVKIDEKDFEHIKSSHEDYFAVEYGKGSGYYDVNKKMDSEDSALCVGAVVTNMFHWWVDQNRENIEKFKKQDPENNGVMKFNGVKEATVDELNHFYKEYQSNKYADQSKFFDLIKKHFGNKALNPEELFELYFNGFYYNSSQRYIEDNKPAQNNLFSKVLENNKLLNPERSYGIDGFSNNVINALKSHKVLGLVHTTPLRYRHIISMWGADIDQDGKVKAIYVTDSDDREITFNDNSKRRIGMKRYDVLVDDFGNIRFTGKGATHKEEGAIYAGLYSLSRGDEVWEDYFKKYPEVQENL

SEQ ID NO: 33 - protein, 319 aa, synthetic construct
  VARIANT 1: note = M or absent or a signal peptide linked via a peptide bond
XTALGRRKAEDRIKETLWVDGVKIDEKDFEHIKSSHEDYFAVEYGKGSGYYDVNKKMDSEDSALCVGAVVTNMFHWWVDQNRENIEKFKKQDPENNGVMKFNGVKETTVDELNHFYKEYQSNKYADQSRFFDLIKKHFGNKALNPEELFELYFNGFYYNSSQRYIEDNKPAQNNLFSKVLENNKLLNPERSYGIDGFSNNVINALKSHKVLGLVHTTPLRYRHIISMWGADIDQDGKVKAIYVTDSDDREITFNDNSKRRIGMKRYDVLVDDFGNIRFTGKGATHKEEGAIYAGLYSLSRGDEVWEDYFKKYPEVQENL

SEQ ID NO: 34 - protein, 319 aa, synthetic construct
  VARIANT 1: note = M or absent or a signal peptide linked via a peptide bond
XTALGRRKAEDRIKETLWVDGVKIDEKDFEHIKSSHEDYFAAEYGKGSGYYDVNKKMDSEDSALCVGAVVTNMFHWWVDQNRENIEKFKKQDPENNGVMKFNGVKETTVDELNHFYKEYQSNKYADQSRFFDLIKKHFGNKALNPEELFELYFNGFYYNSSHRYIEDNKPAQNNLFSKVLENNKLLNPERSYGIDGFSNNVINALKSHKVLGLVHTTPLRYRHIISMWGADIDQDGKVKAIYVTDSDDREITFNDNSKRRIGMKRYDVLVDDFGNIRFTGKGATHKEEGAIYAGLYSLSRGDEVWEDYFKKYPEVQENL

SEQ ID NO: 35 - protein, 319 aa, synthetic construct
  VARIANT 1: note = M or absent or a signal peptide linked via a peptide bond
XTALGRRKAEERIKETLWVDGVKIDEKDFEHIKSSHEDYFAVEYGKGSGYYDVNKKMDSEDSALCVGAVVTNMFHWWVDQNRENIEKFKKQDPENNGVMKFNGVKETTVDELNHFYKEYQSNKYADQSRFFDLIKKHFGNKALNPEELFELYFNGFYYNSSHRYIEDNKPAQNNLFSKVLENNKLLNPERSYGIDGFSNNVINALKSHKVLGLVHTTPLRYRHIISMWGADIDQDGKVKAIYVTDSDDREITFNDNSKRRIGMKRYDVLVDDFGNIRFTGKGATHKEEGAIYAGLYSLSRGDEVWEDYFKKYPEVQENL

SEQ ID NO: 36 - protein, 319 aa, synthetic construct
  VARIANT 1: note = M or absent or a signal peptide linked via a peptide bond
XTALGRRKAEDRIKETLWADGVKIDEKDFEHIKSSHEDYFAVEYGKGSGYYDVNKKMDSEDSALCVGAVVTNMFHWWVDQNRENIEKFKKQDPENNGVMKFEGVKEATVDELNHFYKEYQSNKYADQSRFFDLIKKHFGNKALNPEELFELYFNGFYYNSSHRYIEDNKPAQNNLFSKVLENNKLLNPERSYGIDGFSNNVINALKSHKVLGLVHTTPLRYRHIISMWGADIDQDGKVKAIYVTDSDDREITFNDNSKRRIGMKRYDVLVDDNGNIRFTGKGATHKEEGAIYAGLYSLSRGDEVWEDYFKKYPEVQENL

SEQ ID NO: 37 - protein, 319 aa, synthetic construct
  VARIANT 1: note = M or absent or a signal peptide linked via a peptide bond
XTALGRRKAEDRIKETLWADGVKIDEKDFEHIKSSHEDYFAVEYGKGSGYYDVNKKMDSEDSALCVGAVVTNMFHWWVDQNRENIEKFKKQDPENNGVMKFNGVKEATVDELNHFYKEYQSNKYADQSRFFDLIKKHFGNKALNPEELFELYFNGFYYNSSHRYIEDNKPAQNNLFSKVLENNKLLNPERSYGIDGFSNNVINALKSHKVLGLVHTTPLRYRHIISMWGADIDQDGKVKAIYVTDSDDREITFNDNSARRIGMKRYDVLVDDNGNIRFTGKGATHKEEGAIYAGLYSLSRGDEVWEDYFKKYPEVQENL

SEQ ID NO: 38 - protein, 319 aa, synthetic construct
  VARIANT 1: note = M or absent or a signal peptide linked via a peptide bond
XTALGRRKAEDRIKETLWADGVKIDEKDFEHIKSSHEDYFAVEYGKGSGYYDVNKKMDSEDSALCVGAVVTNMFHWWVDQNRENIEKFKKQDPENNGVMKFNGVKEATVDELNHFYKEYQSNKYADQSRFFDLIKKHFGNKALNPEELFELYFNGFYYNSSQRYIEDNEPAQNNLFSKVLENNKLLNPERSYGIDGFSNNVINALKSHKVLGLVHTTPLEYRHIISMWGADIDQDGKVKAIYVTDSDDREITFNDNSKRRIGMKRYDVLVDDNGNIRFTGKGATHKEEGAIYAGLYSLSRGDEVWEDYFKKYPEVQENL

SEQ ID NO: 39 - protein, 319 aa, synthetic construct
  VARIANT 1: note = M or absent or a signal peptide linked via a peptide bond
XTALGRRKAEDRIKETLWADGVKIDEKDFEHIKSSHEDYFAVEYGKGSGYYDVNKKMDSEDTALCVGAVVTNMFHWWVDQNRENIEKFKKQDPENNGVMKFNGVKEATVDELNHFYKEYQSNKYADQSRFFDLIKKHFGNKALNPEELFELYFNGFYYNSSQRYIEDNEPAQNNLFSKVLENNKLLNPERSYGIDGFSNNVINALKSHKVLGLVHTTPLRYRHIISMWGADIDQDGKVKAIYVTDSDDREITFNDNSKRRIGMKRYDVLVDDNGNIRFTGKGATHKEEGAIYAGLYSLSRGDEVWEDYFKKYPEVQENL

SEQ ID NO: 40 - protein, 319 aa, synthetic construct
  VARIANT 1: note = M or absent or a signal peptide linked via a peptide bond
XTALGRRKAEDRIKETLWADGVKIDEKDFEHIKSSHEDYFAVEYGKGSGYYDVNKKMDSEDTALCVGAVVTNMFHWWVDQNRENIEKFKKQDPENNGVMKFNGVKEATVDELNHFYKEYQSNKYADQSRFFDLIKKHFGNKALNPEELFELYFNGFYYNSSQRYIEDNKPAQNNLFSKVLENNKLLNPERSYGIDGFSNNVINALKSHKVLGLVHTTPLEYRHIISMWGADIDQDGKVKAIYVTDSDDREITFNDNSKRRIGMKRYDVLVDDNGNIRFTGKGATHKEEGAIYAGLYSLSRGDEVWEDYFKKYPEVQENL

SEQ ID NO: 41 - protein, 319 aa, synthetic construct
  VARIANT 1: note = M or absent or a signal peptide linked via a peptide bond
XTALGRRKAEDRIKETLWADGVKIDEKDFEHIKSSHEDYFAVEYGKGSGYYDVNKKMDSEDTALCVGAVVTNMFHWWVDQNRENIEKFKKQDPENNGVMKFNGVKEATVDELNHFYKEYQSNKYADQSRFFDLIKKHFGNKALNPEELFELYFNGFYYNSSHRYIEDNEPAQNNLFSKVLENNKLLNPERSYGIDGFSNNVINALKSHKVLGLVHTTPLEYRHIISMWGADIDQDGKVKAIYVTDSDDREITFNDNSKRRIGMKRYDVLVDDNGNIRFTGKGATHKEEGAIYAGLYSLSRGDEVWEDYFKKYPEVQENL

SEQ ID NO: 42 - protein, 319 aa, synthetic construct
  VARIANT 1: note = M or absent or a signal peptide linked via a peptide bond
XTALGRRKAEDRIKETLWADGVKIDEKDFEHIKSSHEDYFAVEYGKGSGYYDVNKKMDSEDSALCVGAVVTNMFHWWVDQNRENIEKFKKQDPENNGVMKFEGVKEATVDELNHFYKEYQSNKYADQSRFFDLIKKHFGNKALNPEELFELYFNGFYYNSSQRYIEDNEPAQNNLFSKVLENNKLLNPERSYGIDGFSNNVINALKSHKVLGLVHTTPLEYRHIISMWGADIDQDGKVKAIYVTDSDDREITFNDNSKRRIGMKRYDVLVDDNGNIRFTGKGATHKEEGAIYAGLYSLSRGDEVWEDYFKKYPEVQENL

SEQ ID NO: 43 - protein, 319 aa, synthetic construct
  VARIANT 1: note = M or absent or a signal peptide linked via a peptide bond
XTALGRRKAEDRIKETLWADGVKIDEKDFEHIKSSHEDYFAVEYGKGSGYYDVNKKMDSEDTALCVGAVVTNMFHWWVDQNRENIEKFKKQDPENNGVMKFEGVKEATVDELNHFYKEYQSNKYADQSRFFDLIKSHFGNKALNPEELFELYFNGFYYNSSHRYIEDNKPAQNNLFSKVLENNKLLNPERSYGIDGFSNNVINALKSHKVLGLVHTTPLRYRHIISMWGADIDQDGKVKAIYVTDSDDREITFNDNSKRRIGMKRYDVLVDDNGNIRFTGKGATHKEEGAIYAGLYSLSRGDEVWEDYFKKYPEVQENL

SEQ ID NO: 44 - protein, 319 aa, synthetic construct
  VARIANT 1: note = M or absent or a signal peptide linked via a peptide bond
XTALGRRKAEDRIKETLWADGVKIDEKDFEHIKSSHEDYFAVEYGKGSGYYDVNKKMDSEDTALCVGAVVTNMFHWWVDQNRENIEKFKKQDPENNGVMKFEGVKEATVDELNHFYKEYQSNKYADQSRFFDLIKKHFGNKALNPEELFELYFNGFYYNSSQRYIEDNKPAQNNLFSKVLENNKLLNPERSYGIDGFSNNVINALKSHKVLGLVHTTPLRYRHIISMWGADIDQDGKVKAIYVTDSDDREITFNDNSKRRIGMKRYDVLVDDNGNIRFTGKGATHKEEGAIYAGLYSLSRGDEVWEDYFKKYPEVQENL

SEQ ID NO: 45 - protein, 319 aa, synthetic construct
  VARIANT 1: note = M or absent or a signal peptide linked via a peptide bond
XTALGRRKAEDRIKETLWADGVKIDEKDFEHIKSSHEDYFAVEYGKGSGYYDVNKKMDSEDTALCVGAVVTNMFHWWVDQNRENIEKFKKQDPENNGVMKFEGVKEATVDELNHFYKEYQSNKYADQSRFFDLIKKHFGNKALNPEELFELYFNGFYYNSSHRYIEDNEPAQNNLFSKVLENNKLLNPERSYGIDGFSNNVINALKSHKVLGLVHTTPLRYRHIISMWGADIDQDGKVKAIYVTDSDDREITFNDNSKRRIGMKRYDVLVDDNGNIRFTGKGATHKEEGAIYAGLYSLSRGDEVWEDYFKKYPEVQENL

SEQ ID NO: 46 - protein, 319 aa, synthetic construct
  VARIANT 1: note = M or absent or a signal peptide linked via a peptide bond
XTALGRRKAEDRIKETLWADGVKIDEKDFEHIKSSHEDYFAVEYGKGSGYYDVNKKMDSEDTALCVGAVVTNMFHWWVDQNRENIEKFKKQDPENNGVMKFEGVKEATVDELNHFYKEYQSNKYADQSRFFDLIKKHFGNKALNPEELFELYFNGFYYNSSHRYIEDNKPAQNNLFSKVLENNKLLNPERSYGIDGFSNNVINALKSHKVLGLVHTTPLEYRHIISMWGADIDQDGKVKAIYVTDSDDREITFNDNSKRRIGMKRYDVLVDDNGNIRFTGKGATHKEEGAIYAGLYSLSRGDEVWEDYFKKYPEVQENL

SEQ ID NO: 47 - protein, 319 aa, synthetic construct
  VARIANT 1: note = M or absent or a signal peptide linked via a peptide bond
XTALGRRKAEDRIKETLWADGVKIDEKDFEHIKSSHEDYFAVEYGKGSGYYDVNKKMDSEDTALCVGAVVTNMFHWWVDQNRENIEKFKKQDPENNGVMKFEGVKEATVDELNHFYKEYQSNKYADQSRFFDLIKKHFGNKALNPEELFELYFNGFYYNSSHRYIEDNKPAQNNLFSKVLENNKLLNPERSYGIDGFSNNVINALKSHKVLGLVHTTPLRYRHIISMWGADIDQDGKVKAIYVTDSDDREITFNDNSARRIGMKRYDVLVDDNGNIRFTGKGATHKEEGAIYAGLYSLSRGDEVWEDYFKKYPEVQENL

SEQ ID NO: 48 - protein, 319 aa, synthetic construct
  VARIANT 1: note = M or absent or a signal peptide linked via a peptide bond
XTALGRRKAEDRIKETLWADGVKIDEKDFEHIKSSHEDYFAVEYGKGSGYYDVNKKMDSEDTALCVGAVVTNMFHWWVDQNRENIEKFKKQDPENNGVMKFEGVKEATVDELNHFYKEYQSNKYADQSRFFDLIKSHFGNKALNPEELFELYFNGFYYNSSHRYIEDNKPAQNNLFSKVLENNKLLNPERSYGIDGFSNNVINALKSHKVLGLVHTTPLRYRHIISMWGADIDQDGKVKAIYVTDSDDREITFNDNSARRIGMKRYDVLVDDNGNIRFTGKGATHKEEGAIYAGLYSLSRGDEVWEDYFKKYPEVQENL

SEQ ID NO: 49 - protein, 319 aa, synthetic construct
  VARIANT 1: note = M or absent or a signal peptide linked via a peptide bond
XTALGRRKAEDRIKETLWADGVKIDEKDFEHIKSSHEDYFAVEYGKGSGYYDVNKKMDSEDTALCVGAVVTNMFHWWVDQNRENIEKFKKQDPENNGVMKFNGVKEATVDELNHFYKEYQSNKYADQSRFFDLIKSHFGNKALNPEELFELYFNGFYYNSSHRYIEDNKPAQNNLFSKVLENNKLLNPERSYGIDGFSNNVINALKSHKVLGLVHTTPLRYRHIISMWGADIDQDGKVKAIYVTDSDDREITFNDNSARRIGMKRYDVLVDDNGNIRFTGKGATHKEEGAIYAGLYSLSRGDEVWEDYFKKYPEVQENL

SEQ ID NO: 50 - protein, 319 aa, synthetic construct
  VARIANT 1: note = M or absent or a signal peptide linked via a peptide bond
XTALGRRKAEDRIKETLWADGVKIDEKDFEHIKSSHEDYFAVEYGKGSGYYDVNKKMDSEDTALCVGAVVTNMFHWWVDQNRENIEKFKKQDPENNGVMKFEGVKEATVDELNHFYKEYQSNKYADQSRFFDLIKKHFGNKALNPEELFELYFNGFYYNSSHRYIEDNKPAQNNLFSKVLENNKLLNPERSYGIDGFSNNVINALKSHKVLGLVHTTPLRYRHIISMWGADIDQDGKVKAIYVTDSDDREITFNDNSKRRIGMKRYDVLVDDNGNIRFTGKGATHKEEGAIYAGLYSLSRGDEVWEDYFKKYPEVQENL

SEQ ID NO: 51 - protein, 319 aa, synthetic construct
  VARIANT 1: note = M or absent or a signal peptide linked via a peptide bond
XTALGRRKAEDRIKETLWADGVKIDEKDFEHIKSSHEDYFAVEYGKGSGYYDVNKKMDSEDTALCVGAVVTNMFHWWVDQNRENIEKFKKQDPENNGVMKFNGVKEATVDELNHFYKEYQSNKYADQSRFFDLIKSHFGNKALNPEELFELYFNGFYYNSSHRYIEDNKPAQNNLFSKVLENNKLLNPERSYGIDGFSNNVINALKSHKVLGLVHTTPLRYRHIISMWGADIDQDGKVKAIYVTDSDDREITFNDNSKRRIGMKRYDVLVDDNGNIRFTGKGATHKEEGAIYAGLYSLSRGDEVWEDYFKKYPEVQENL

SEQ ID NO: 52 - protein, 319 aa, synthetic construct
  VARIANT 1: note = M or absent or a signal peptide linked via a peptide bond
XTALGRRKAEDRIKETLWADGVKIDEKDFEHIKSSHEDYFAVEYGKGSGYYDVNKKMDSEDTALCVGAVVTNMFHWWVDQNRENIEKFKKQDPENNGVMKFNGVKEATVDELNHFYKEYQSNKYADQSRFFDLIKKHFGNKALNPEELFELYFNGFYYNSSHRYIEDNKPAQNNLFSKVLENNKLLNPERSYGIDGFSNNVINALKSHKVLGLVHTTPLRYRHIISMWGADIDQDGKVKAIYVTDSDDREITFNDNSARRIGMKRYDVLVDDNGNIRFTGKGATHKEEGAIYAGLYSLSRGDEVWEDYFKKYPEVQENL

SEQ ID NO: 53 - protein, 319 aa, synthetic construct
  VARIANT 1: note = M or absent or a signal peptide linked via a peptide bond
XTALGRRKAEDRIKETLWADGVKIDEKDFEHIKSSHEDYFAVEYGKGSGYYDVNKKMDSEDTALCVGAVVTNMFHWWVDQNRENIEKFKKQDPENNGVMKFNGVKEATVDELNHFYKEYQSNKYADQSRFFDLIKSHFGNKALNPEELFELYFNGFYYNSSHRYIEDNKPAQNNLFSKVLENNKLLNPERSYGIDGFSNNVINALKSHKVLGLVHTTPLRYRHIISMWGADIDQDGKVKAIYVTDSDDRQITFNDNSARRIGMKRYDVLVDDNGNIRFTGKGATHKEEGAIYAGLYSLSRGDEVWEDYFKKYPEVQENL

SEQ ID NO: 54 - protein, 319 aa, synthetic construct
  VARIANT 1: note = M or absent or a signal peptide linked via a peptide bond
XTALGRRKAEDRIKETLWADGVKIDEKDFEHIKSSHEDYFAVEYGKGSGYYDVNKKMDSEDTALCVGAVVTNMFHWWVDQNRENIEKFKKQDPENNGVMKFEGVKEATVDELNHFYKEYQSNKYADQSRFFDLIKSHFGNKALNPEELFELYFNGFYYNSSHRYIEDNKPAQNNLFSKVLENNKLLNPERSYGIDGFSNNVINALKSHKVLGLVHTTPLRYRHIISMWGADIDQDGKVKAIYVTDSDDRQITFNDNSARRIGMKRYDVLVDDNGNIRFTGKGATHKEEGAIYAGLYSLSRGDEVWEDYFKKYPEVQENL

SEQ ID NO: 55 - protein, 319 aa, synthetic construct
  VARIANT 1: note = M or absent or a signal peptide linked via a peptide bond
XTALGRRKAEDRIKETLWADGVKIDEKDFEHIKSSHEDYFAVEYGKGSGYYDVNKKMDSEDSALCVGAVVTNMFHWWVDQNRENIEKFKKQDPENNGVMKFEGVKEATVDELNHFYKEYQSNKYADQSRFFDLIKKHFGNKALNPEELFELYFNGFYYNSSHRYIEDNKPAQNNLFSKVLENNKLLNPERSYGIDGFSNNVINALKSHKVLGLVHTTPLRYRHIISMWGADIDQDGKVKAIYVTDSDDREITFNDNSKRRIGMKRYDVLVDDFGNIRFTGKGATHKEEGAIYAGLYSLSRGDEVWEDYFKKYPEVQENL

SEQ ID NO: 56 - protein, 319 aa, synthetic construct
  VARIANT 1: note = M or absent or a signal peptide linked via a peptide bond
XTALGRRKAEDRIKETLWADGVKIDEKDFEHIKSSHEDYFAVEYGKGSGYYDVNKKMDSEDSALCVGAVVTNMFHWWVDQNRENIEKFKKQDPENNGVMKFNGVKEATVDELNHFYKEYQSNKYADQSRFFDLIKKHFGNKALNPEELFELYFNGFYYNSSHRYIEDNKPAQNNLFSKVLENNKLLNPERSYGIDGFSNNVINALKSHKVLGLVHTTPLRYRHIISMWGADIDQDGKVKAIYVTDSDDREITFNDNSARRIGMKRYDVLVDDFGNIRFTGKGATHKEEGAIYAGLYSLSRGDEVWEDYFKKYPEVQENL

SEQ ID NO: 57 - protein, 319 aa, synthetic construct
  VARIANT 1: note = M or absent or a signal peptide linked via a peptide bond
XTALGRRKAEDRIKETLWADGVKIDEKDFEHIKSSHEDYFAVEYGKGSGYYDVNKKMDSEDSALCVGAVVTNMFHWWVDQNRENIEKFKKQDPENNGVMKFNGVKEATVDELNHFYKEYQSNKYADQSRFFDLIKKHFGNKALNPEELFELYFNGFYYNSSQRYIEDNEPAQNNLFSKVLENNKLLNPERSYGIDGFSNNVINALKSHKVLGLVHTTPLEYRHIISMWGADIDQDGKVKAIYVTDSDDREITFNDNSKRRIGMKRYDVLVDDFGNIRFTGKGATHKEEGAIYAGLYSLSRGDEVWEDYFKKYPEVQENL

SEQ ID NO: 58 - protein, 319 aa, synthetic construct
  VARIANT 1: note = M or absent or a signal peptide linked via a peptide bond
XTALGRRKAEDRIKETLWADGVKIDEKDFEHIKSSHEDYFAVEYGKGSGYYDVNKKMDSEDSALCVGAVVTNMFHWWVDQNRENIEKFKKQDPENNGVMKFNGVKEATVDELNHFYKEYQSNKYADQSRFFDLIKKHFGNKALNPEELFELYFNGFYYNSSQRYIEDNEPAQNNLFSKVLENNKLLNPERSYGIDGFSNNVINALKSHKVLGLVHTTPLRYRHIISMWGADIDQDGKVKAIYVTDSDDREITFNDNSKRRIGMKRYDVLVDDFGNIRFTGKGATHKEEGAIYAGLYSLSRGDEVWEDYFKKYPEVQENL

SEQ ID NO: 59 - protein, 319 aa, synthetic construct
  VARIANT 1: note = M or absent or a signal peptide linked via a peptide bond
XTALGRRKAEDRIKETLWADGVKIDEKDFEHIKSSHEDYFAVEYGKGSGYYDVNKKMDSEDSALCVGAVVTNMFHWWVDQNRENIEKFKKQDPENNGVMKFNGVKEATVDELNHFYKEYQSNKYADQSRFFDLIKKHFGNKALNPEELFELYFNGFYYNSSQRYIEDNKPAQNNLFSKVLENNKLLNPERSYGIDGFSNNVINALKSHKVLGLVHTTPLEYRHIISMWGADIDQDGKVKAIYVTDSDDREITFNDNSKRRIGMKRYDVLVDDFGNIRFTGKGATHKEEGAIYAGLYSLSRGDEVWEDYFKKYPEVQENL

SEQ ID NO: 60 - protein, 319 aa, synthetic construct
  VARIANT 1: note = M or absent or a signal peptide linked via a peptide bond
XTALGRRKAEDRIKETLWADGVKIDEKDFEHIKSSHEDYFAVEYGKGSGYYDVNKKMDSEDSALCVGAVVTNMFHWWVDQNRENIEKFKKQDPENNGVMKFNGVKEATVDELNHFYKEYQSNKYADQSRFFDLIKKHFGNKALNPEELFELYFNGFYYNSSHRYIEDNEPAQNNLFSKVLENNKLLNPERSYGIDGFSNNVINALKSHKVLGLVHTTPLEYRHIISMWGADIDQDGKVKAIYVTDSDDREITFNDNSKRRIGMKRYDVLVDDFGNIRFTGKGATHKEEGAIYAGLYSLSRGDEVWEDYFKKYPEVQENL

SEQ ID NO: 61 - protein, 319 aa, synthetic construct
  VARIANT 1: note = M or absent or a signal peptide linked via a peptide bond
XTALGRRKAEDRIKETLWADGVKIDEKDFEHIKSSHEDYFAVEYGKGSGYYDVNKKMDSEDSALCVGAVVTNMFHWWVDQNRENIEKFKKQDPENNGVMKFEGVKEATVDELNHFYKEYQSNKYADQSRFFDLIKKHFGNKALNPEELFELYFNGFYYNSSQRYIEDNEPAQNNLFSKVLENNKLLNPERSYGIDGFSNNVINALKSHKVLGLVHTTPLEYRHIISMWGADIDQDGKVKAIYVTDSDDREITFNDNSKRRIGMKRYDVLVDDFGNIRFTGKGATHKEEGAIYAGLYSLSRGDEVWEDYFKKYPEVQENL

SEQ ID NO: 62 - protein, 319 aa, synthetic construct
  VARIANT 1: note = M or absent or a signal peptide linked via a peptide bond
XTALGRRKAEDRIKETLWADGVKIDEKDFEHIKSSHEDYFAVEYGKGSGYYDVNKKMDSEDSALCVGAVVTNMFHWWVDQNRENIEKFKKQDPENNGVMKFEGVKEATVDELNHFYKEYQSNKYADQSRFFDLIKSHFGNKALNPEELFELYFNGFYYNSSHRYIEDNKPAQNNLFSKVLENNKLLNPERSYGIDGFSNNVINALKSHKVLGLVHTTPLRYRHIISMWGADIDQDGKVKAIYVTDSDDREITFNDNSKRRIGMKRYDVLVDDFGNIRFTGKGATHKEEGAIYAGLYSLSRGDEVWEDYFKKYPEVQENL

SEQ ID NO: 63 - protein, 319 aa, synthetic construct
  VARIANT 1: note = M or absent or a signal peptide linked via a peptide bond
XTALGRRKAEDRIKETLWADGVKIDEKDFEHIKSSHEDYFAVEYGKGSGYYDVNKKMDSEDSALCVGAVVTNMFHWWVDQNRENIEKFKKQDPENNGVMKFEGVKEATVDELNHFYKEYQSNKYADQSRFFDLIKKHFGNKALNPEELFELYFNGFYYNSSQRYIEDNKPAQNNLFSKVLENNKLLNPERSYGIDGFSNNVINALKSHKVLGLVHTTPLRYRHIISMWGADIDQDGKVKAIYVTDSDDREITFNDNSKRRIGMKRYDVLVDDFGNIRFTGKGATHKEEGAIYAGLYSLSRGDEVWEDYFKKYPEVQENL

SEQ ID NO: 64 - protein, 319 aa, synthetic construct
  VARIANT 1: note = M or absent or a signal peptide linked via a peptide bond
XTALGRRKAEDRIKETLWADGVKIDEKDFEHIKSSHEDYFAVEYGKGSGYYDVNKKMDSEDSALCVGAVVTNMFHWWVDQNRENIEKFKKQDPENNGVMKFEGVKEATVDELNHFYKEYQSNKYADQSRFFDLIKKHFGNKALNPEELFELYFNGFYYNSSHRYIEDNEPAQNNLFSKVLENNKLLNPERSYGIDGFSNNVINALKSHKVLGLVHTTPLRYRHIISMWGADIDQDGKVKAIYVTDSDDREITFNDNSKRRIGMKRYDVLVDDFGNIRFTGKGATHKEEGAIYAGLYSLSRGDEVWEDYFKKYPEVQENL

SEQ ID NO: 65 - protein, 319 aa, synthetic construct
  VARIANT 1: note = M or absent or a signal peptide linked via a peptide bond
XTALGRRKAEDRIKETLWADGVKIDEKDFEHIKSSHEDYFAVEYGKGSGYYDVNKKMDSEDSALCVGAVVTNMFHWWVDQNRENIEKFKKQDPENNGVMKFEGVKEATVDELNHFYKEYQSNKYADQSRFFDLIKKHFGNKALNPEELFELYFNGFYYNSSHRYIEDNKPAQNNLFSKVLENNKLLNPERSYGIDGFSNNVINALKSHKVLGLVHTTPLEYRHIISMWGADIDQDGKVKAIYVTDSDDREITFNDNSKRRIGMKRYDVLVDDFGNIRFTGKGATHKEEGAIYAGLYSLSRGDEVWEDYFKKYPEVQENL

SEQ ID NO: 66 - protein, 319 aa, synthetic construct
  VARIANT 1: note = M or absent or a signal peptide linked via a peptide bond
XTALGRRKAEDRIKETLWADGVKIDEKDFEHIKSSHEDYFAVEYGKGSGYYDVNKKMDSEDSALCVGAVVTNMFHWWVDQNRENIEKFKKQDPENNGVMKFEGVKEATVDELNHFYKEYQSNKYADQSRFFDLIKKHFGNKALNPEELFELYFNGFYYNSSHRYIEDNKPAQNNLFSKVLENNKLLNPERSYGIDGFSNNVINALKSHKVLGLVHTTPLRYRHIISMWGADIDQDGKVKAIYVTDSDDREITFNDNSARRIGMKRYDVLVDDFGNIRFTGKGATHKEEGAIYAGLYSLSRGDEVWEDYFKKYPEVQENL

SEQ ID NO: 67 - protein, 319 aa, synthetic construct
  VARIANT 1: note = M or absent or a signal peptide linked via a peptide bond
XTALGRRKAEDRIKETLWADGVKIDEKDFEHIKSSHEDYFAVEYGKGSGYYDVNKKMDSEDSALCVGAVVTNMFHWWVDQNRENIEKFKKQDPENNGVMKFEGVKEATVDELNHFYKEYQSNKYADQSRFFDLIKSHFGNKALNPEELFELYFNGFYYNSSHRYIEDNKPAQNNLFSKVLENNKLLNPERSYGIDGFSNNVINALKSHKVLGLVHTTPLRYRHIISMWGADIDQDGKVKAIYVTDSDDREITFNDNSARRIGMKRYDVLVDDFGNIRFTGKGATHKEEGAIYAGLYSLSRGDEVWEDYFKKYPEVQENL

SEQ ID NO: 68 - protein, 319 aa, synthetic construct
  VARIANT 1: note = M or absent or a signal peptide linked via a peptide bond
XTALGRRKAEDRIKETLWADGVKIDEKDFEHIKSSHEDYFAVEYGKGSGYYDVNKKMDSEDSALCVGAVVTNMFHWWVDQNRENIEKFKKQDPENNGVMKFNGVKEATVDELNHFYKEYQSNKYADQSRFFDLIKSHFGNKALNPEELFELYFNGFYYNSSHRYIEDNKPAQNNLFSKVLENNKLLNPERSYGIDGFSNNVINALKSHKVLGLVHTTPLRYRHIISMWGADIDQDGKVKAIYVTDSDDREITFNDNSARRIGMKRYDVLVDDFGNIRFTGKGATHKEEGAIYAGLYSLSRGDEVWEDYFKKYPEVQENL

SEQ ID NO: 69 - protein, 319 aa, synthetic construct
  VARIANT 1: note = M or absent or a signal peptide linked via a peptide bond
XTALGRRKAEDRIKETLWADGVKIDEKDFEHIKSSHEDYFAVEYGKGSGYYDVNKKMDSEDSALCVGAVVTNMFHWWVDQNRENIEKFKKQDPENNGVMKFNGVKEATVDELNHFYKEYQSNKYADQSRFFDLIKSHFGNKALNPEELFELYFNGFYYNSSHRYIEDNKPAQNNLFSKVLENNKLLNPERSYGIDGFSNNVINALKSHKVLGLVHTTPLRYRHIISMWGADIDQDGKVKAIYVTDSDDREITFNDNSKRRIGMKRYDVLVDDFGNIRFTGKGATHKEEGAIYAGLYSLSRGDEVWEDYFKKYPEVQENL

SEQ ID NO: 70 - protein, 319 aa, synthetic construct
  VARIANT 1: note = M or absent or a signal peptide linked via a peptide bond
XTALGRRKAEDRIKETLWADGVKIDEKDFEHIKSSHEDYFAVEYGKGSGYYDVNKKMDSEDSALCVGAVVTNMFHWWVDQNRENIEKFKKQDPENNGVMKFNGVKEATVDELNHFYKEYQSNKYADQSRFFDLIKSHFGNKALNPEELFELFFNGFYYNSSHRYIEDNKPAQNNLFSKVLENNKLLNPERSYGIDGFSNNVINALKSHKVLGLVHTTPLRYRHIISMWGADIDQDGKVKAIYVTDSDDREITFNDNSARRIGMKRYDVLVDDFGNIRFTGKGATHKEEGAIYAGLYSLSRGDEVWEDYFKKYPEVQENL

SEQ ID NO: 71 - protein, 319 aa, synthetic construct
  VARIANT 1: note = M or absent or a signal peptide linked via a peptide bond
XTALGRRKAEDRIKETLWADGVKIDEKDFEHIKSSHEDYFAVEYGKGSGYYDVNKKMDSEDSALCVGAVVTNMFHWWVDQNRENIEKFKKQDPENNGVMKFNGVKEATVDELNHFYKEYQSNKYADQSRFFDLIKSHFGNKALNPEELFELYFNGFYYNSSHRYIEDNKPAQNNLFSKVLENNKLLNPERSYGIDGFSNNVINALKSHKVLGLVHTTPLRYRHIISMWGADIDQDGKVKAIYVTDSDDRQITFNDNSARRIGMKRYDVLVDDFGNIRFTGKGATHKEEGAIYAGLYSLSRGDEVWEDYFKKYPEVQENL

SEQ ID NO: 72 - protein, 319 aa, synthetic construct
  VARIANT 1: note = M or absent or a signal peptide linked via a peptide bond
XTALGRRKAEDRIKETLWADGVKIDEKDFEHIKSSHEDYFAVEYGKGSGYYDVNKKMDSEDSALCVGAVVTNMFHWWVDQNRENIEKFKKQDPENNGVMKFEGVKEATVDELNHFYKEYQSNKYADQSRFFDLIKSHFGNKALNPEELFELYFNGFYYNSSHRYIEDNKPAQNNLFSKVLENNKLLNPERSYGIDGFSNNVINALKSHKVLGLVHTTPLRYRHIISMWGADIDQDGKVKAIYVTDSDDRQITFNDNSARRIGMKRYDVLVDDFGNIRFTGKGATHKEEGAIYAGLYSLSRGDEVWEDYFKKYPEVQENL

SEQ ID NO: 73 - protein, 319 aa, synthetic construct
  VARIANT 1: note = M or absent or a signal peptide linked via a peptide bond
XTALGRRKAEDRIKETLWADGVKIDEKDFEHIKSSHEDYFAVEYGKGSGYYDVNKKMDSEDTALCVGAVVTNMFHWWVDQNRENIEKFKKQDPENNGVMKFNGVKDATVDELNHFYKEYQSNKYADQSRFFDLIKKHFGNKALNPEELFELYFNGFYYNSSHRYIEDNKPAQNNLFSKVLENNKLLNPERSYGIDGFSNNVINALKSHKVLGLVHTTPLRYRHIISMWGADIDQDGKVKAIYVTDSDDREITFNDNSKRRIGMKRYDVLVDDNGNIRFTGKGATHKEEGAIYAGLYSLSRGDEVWEDYFKKYPEVQENL

SEQ ID NO: 74 - protein, 319 aa, synthetic construct
  VARIANT 1: note = M or absent or a signal peptide linked via a peptide bond
XTALGRRKAEDRIKETLWADGVKIDEKDFEHIKSSHEDYFAVEYGKGSGYYDVNKKMDSEDTALCVGAVVTNMFHWWVDQNRENIEKFKKQDPENNGVMKFNGVKEATVDELNHFYKEYQSNKYADQSRFFDLIKTHFGNKALNPEELFELYFNGFYYNSSHRYIEDNKPAQNNLFSKVLENNKLLNPERSYGIDGFSNNVINALKSHKVLGLVHTTPLRYRHIISMWGADIDQDGKVKAIYVTDSDDREITFNDNSKRRIGMKRYDVLVDDNGNIRFTGKGATHKEEGAIYAGLYSLSRGDEVWEDYFKKYPEVQENL

SEQ ID NO: 75 - protein, 319 aa, synthetic construct
  VARIANT 1: note = M or absent or a signal peptide linked via a peptide bond
XTALGRRKAEDRIKETLWADGVKIDEKDFEHIKSSHEDYFAVEYGKGSGYYDVNKKMDSEDTALCVGAVVTNMFHWWVDQNRENIEKFKKQDPENNGVMKFNGVKEATVDELNHFYKEYQSNKYADQSRFFDLIKDHFGNKALNPEELFELYFNGFYYNSSHRYIEDNKPAQNNLFSKVLENNKLLNPERSYGIDGFSNNVINALKSHKVLGLVHTTPLRYRHIISMWGADIDQDGKVKAIYVTDSDDREITFNDNSKRRIGMKRYDVLVDDNGNIRFTGKGATHKEEGAIYAGLYSLSRGDEVWEDYFKKYPEVQENL

SEQ ID NO: 76 - protein, 319 aa, synthetic construct
  VARIANT 1: note = M or absent or a signal peptide linked via a peptide bond
XTALGRRKAEDRIKETLWADGVKIDEKDFEHIKSSHEDYFAVEYGKGSGYYDVNKKMDSEDTALCVGAVVTNMFHWWVDQNRENIEKFKKQDPENNGVMKFNGVKEATVDELNHFYKEYQSNKYADQSRFFDLIKNHFGNKALNPEELFELYFNGFYYNSSHRYIEDNKPAQNNLFSKVLENNKLLNPERSYGIDGFSNNVINALKSHKVLGLVHTTPLRYRHIISMWGADIDQDGKVKAIYVTDSDDREITFNDNSKRRIGMKRYDVLVDDNGNIRFTGKGATHKEEGAIYAGLYSLSRGDEVWEDYFKKYPEVQENL

SEQ ID NO: 77 - protein, 319 aa, synthetic construct
  VARIANT 1: note = M or absent or a signal peptide linked via a peptide bond
XTALGRRKAEDRIKETLWADGVKIDEKDFEHIKSSHEDYFAVEYGKGSGYYDVNKKMDSEDTALCVGAVVTNMFHWWVDQNRENIEKFKKQDPENNGVMKFNGVKEATVDELNHFYKEYQSNKYADQSRFFDLIKKHFGNKALNPEELFELYFNGFYYNSSSRYIEDNKPAQNNLFSKVLENNKLLNPERSYGIDGFSNNVINALKSHKVLGLVHTTPLRYRHIISMWGADIDQDGKVKAIYVTDSDDREITFNDNSKRRIGMKRYDVLVDDNGNIRFTGKGATHKEEGAIYAGLYSLSRGDEVWEDYFKKYPEVQENL

SEQ ID NO: 78 - protein, 319 aa, synthetic construct
  VARIANT 1: note = M or absent or a signal peptide linked via a peptide bond
XTALGRRKAEDRIKETLWADGVKIDEKDFEHIKSSHEDYFAVEYGKGSGYYDVNKKMDSEDTALCVGAVVTNMFHWWVDQNRENIEKFKKQDPENNGVMKFNGVKEATVDELNHFYKEYQSNKYADQSRFFDLIKKHFGNKALNPEELFELYFNGFYYNSSERYIEDNKPAQNNLFSKVLENNKLLNPERSYGIDGFSNNVINALKSHKVLGLVHTTPLRYRHIISMWGADIDQDGKVKAIYVTDSDDREITFNDNSKRRIGMKRYDVLVDDNGNIRFTGKGATHKEEGAIYAGLYSLSRGDEVWEDYFKKYPEVQENL

SEQ ID NO: 79 - protein, 319 aa, synthetic construct
  VARIANT 1: note = M or absent or a signal peptide linked via a peptide bond
XTALGRRKAEDRIKETLWADGVKIDEKDFEHIKSSHEDYFAVEYGKGSGYYDVNKKMDSEDTALCVGAVVTNMFHWWVDQNRENIEKFKKQDPENNGVMKFNGVKEATVDELNHFYKEYQSNKYADQSRFFDLIKKHFGNKALNPEELFELYFNGFYYNSSTRYIEDNKPAQNNLFSKVLENNKLLNPERSYGIDGFSNNVINALKSHKVLGLVHTTPLRYRHIISMWGADIDQDGKVKAIYVTDSDDREITFNDNSKRRIGMKRYDVLVDDNGNIRFTGKGATHKEEGAIYAGLYSLSRGDEVWEDYFKKYPEVQENL

SEQ ID NO: 80 - protein, 319 aa, synthetic construct
  VARIANT 1: note = M or absent or a signal peptide linked via a peptide bond
XTALGRRKAEDRIKETLWADGVKIDEKDFEHIKSSHEDYFAVEYGKGSGYYDVNKKMDSDDTALCVGAVVTNMFHWWVDQNRENIEKFKKQDPENNGVMKFNGVKEATVDELNHFYKEYQSNKYADQSRFFDLIKKHFGNKALNPEELFELYFNGFYYNSSHRYIEDNKPAQNNLFSKVLENNKLLNPERSYGIDGFSNNVINALKSHKVLGLVHTTPLRYRHIISMWGADIDQDGKVKAIYVTDSDDREITFNDNSKRRIGMKRYDVLVDDNGNIRFTGKGATHKEEGAIYAGLYSLSRGDEVWEDYFKKYPEVQENL

SEQ ID NO: 81 - protein, 319 aa, synthetic construct
  VARIANT 1: note = M or absent or a signal peptide linked via a peptide bond
XTALGRRKAEDRIKETLWADGVKIDEKDFEHIKSSHEDYFAVEYGKGSGYYDVNKKMDSEDEALCVGAVVTNMFHWWVDQNRENIEKFKKQDPENNGVMKFNGVKEATVDELNHFYKEYQSNKYADQSRFFDLIKKHFGNKALNPEELFELYFNGFYYNSSHRYIEDNKPAQNNLFSKVLENNKLLNPERSYGIDGFSNNVINALKSHKVLGLVHTTPLRYRHIISMWGADIDQDGKVKAIYVTDSDDREITFNDNSKRRIGMKRYDVLVDDNGNIRFTGKGATHKEEGAIYAGLYSLSRGDEVWEDYFKKYPEVQENL

SEQ ID NO: 82 - protein, 319 aa, synthetic construct
  VARIANT 1: note = M or absent or a signal peptide linked via a peptide bond
XTALGRRKAEDRIKETLWADGVKIDEKDFEHIKSSHEDYFAVEYGKGSGYYDVNKKMDSEDNALCVGAVVTNMFHWWVDQNRENIEKFKKQDPENNGVMKFNGVKEATVDELNHFYKEYQSNKYADQSRFFDLIKKHFGNKALNPEELFELYFNGFYYNSSHRYIEDNKPAQNNLFSKVLENNKLLNPERSYGIDGFSNNVINALKSHKVLGLVHTTPLRYRHIISMWGADIDQDGKVKAIYVTDSDDREITFNDNSKRRIGMKRYDVLVDDNGNIRFTGKGATHKEEGAIYAGLYSLSRGDEVWEDYFKKYPEVQENL

SEQ ID NO: 83 - protein, 319 aa, synthetic construct
  VARIANT 1: note = M or absent or a signal peptide linked via a peptide bond
XTALGRRKAEDRIKETLWADGVKIDEKDFEHIKSSHEDYFAVEYGKGSGYYDVNKKMDSEDTALCVGAVVTNMFHWWVDQNRENIEKFKKQDPENNGVMKFNGVKEATVDELNHFYKEYQSNKYADQSRFFDLIKKHFGNKALNPEELFELYFNGFYYNSSHRYIEDNDPAQNNLFSKVLENNKLLNPERSYGIDGFSNNVINALKSHKVLGLVHTTPLRYRHIISMWGADIDQDGKVKAIYVTDSDDREITFNDNSKRRIGMKRYDVLVDDNGNIRFTGKGATHKEEGAIYAGLYSLSRGDEVWEDYFKKYPEVQENL

SEQ ID NO: 84 - protein, 319 aa, synthetic construct
  VARIANT 1: note = M or absent or a signal peptide linked via a peptide bond
XTALGRRKAEDRIKETLWADGVKIDEKDFEHIKSSHEDYFAVEYGKGSGYYDVNKKMDSEDTALCVGAVVTNMFHWWVDQNRENIEKFKKQDPENNGVMKFNGVKEATVDELNHFYKEYQSNKYADQSRFFDLIKKHFGNKALNPEELFELYFNGFYYNSSHRYIEDNNPAQNNLFSKVLENNKLLNPERSYGIDGFSNNVINALKSHKVLGLVHTTPLRYRHIISMWGADIDQDGKVKAIYVTDSDDREITFNDNSKRRIGMKRYDVLVDDNGNIRFTGKGATHKEEGAIYAGLYSLSRGDEVWEDYFKKYPEVQENL

SEQ ID NO: 85 - protein, 319 aa, synthetic construct
  VARIANT 1: note = M or absent or a signal peptide linked via a peptide bond
XTALGRRKAEDRIKETLWADGVKIDEKDFEHIKSSHEDYFAVEYGKGSGYYDVNKKMDSEDTALCVGAVVTNMFHWWVDQNRENIEKFKKQDPENNGVMKFDGVKEATVDELNHFYKEYQSNKYADQSRFFDLIKKHFGNKALNPEELFELYFNGFYYNSSHRYIEDNKPAQNNLFSKVLENNKLLNPERSYGIDGFSNNVINALKSHKVLGLVHTTPLRYRHIISMWGADIDQDGKVKAIYVTDSDDREITFNDNSKRRIGMKRYDVLVDDNGNIRFTGKGATHKEEGAIYAGLYSLSRGDEVWEDYFKKYPEVQENL

SEQ ID NO: 86 - protein, 319 aa, synthetic construct
  VARIANT 1: note = M or absent or a signal peptide linked via a peptide bond
XTALGRRKAEDRIKETLWADGVKIDEKDFEHIKSSHEDYFAVEYGKGSGYYDVNKKMDSEDTALCVGAVVTNMFHWWVDQNRENIEKFKKQDPENNGVMKFNGVKEATVDELNHFYKEYQSNKYADQSRFFDLIKKHFGNKALNPEELFELYFNGFYYNSSHRYIEDNKPAQNNLFSKVLENNKLLNPERSYGIDGFSNNVINALKSHKVLGLVHTTPLDYRHIISMWGADIDQDGKVKAIYVTDSDDREITFNDNSKRRIGMKRYDVLVDDNGNIRFTGKGATHKEEGAIYAGLYSLSRGDEVWEDYFKKYPEVQENL

SEQ ID NO: 87 - protein, 319 aa, synthetic construct
  VARIANT 1: note = M or absent or a signal peptide linked via a peptide bond
XTALGRRKAEDRIKETLWADGVKIDEKDFEHIKSSHEDYFAVEYGKGSGYYDVNKKMDSEDTALCVGAVVTNMFHWWVDQNRENIEKFKKQDPENNGVMKFNGVKEATVDELNHFYKEYQSNKYADQSRFFDLIKKHFGNKALNPEELFELYFNGFYYNSSHRYIEDNKPAQNNLFSKVLENNKLLNPERSYGIDGFSNNVINALKSHKVLGLVHTTPLAYRHIISMWGADIDQDGKVKAIYVTDSDDREITFNDNSKRRIGMKRYDVLVDDNGNIRFTGKGATHKEEGAIYAGLYSLSRGDEVWEDYFKKYPEVQENL

SEQ ID NO: 88 - protein, 319 aa, synthetic construct
  VARIANT 1: note = M or absent or a signal peptide linked via a peptide bond
XTALGRRKAEDRIKETLWADGVKIDEKDFEHIKSSHEDYFAVEYGKGSGYYDVNKKMDSEDTALCVGAVVTNMFHWWVDQNRENIEKFKKQDPENNGVMKFNGVKEATVDELNHFYKEYQSNKYADQSRFFDLIKKHFGNKALNPEELFELYFNGFYYNSSHRYIEDNKPAQNNLFSKVLENNKLLNPERSYGIDGFSNNVINALKSHKVLGLVHTTPLYYRHIISMWGADIDQDGKVKAIYVTDSDDREITFNDNSKRRIGMKRYDVLVDDNGNIRFTGKGATHKEEGAIYAGLYSLSRGDEVWEDYFKKYPEVQENL

SEQ ID NO: 89 - protein, 319 aa, synthetic construct
  VARIANT 1: note = M or absent or a signal peptide linked via a peptide bond
XTALGRRKAEDRIKETLWADGVKIDEKDFEHIKSSHEDYFAVEYGKGSGYYDVNKKMDSEDTALCVGAVVTNMFHWWVDQNRENIEKFKKQDPENNGVMKFNGVKEATVDELNHFYKEYQSNKYADQSRFFDLIKKHFGNKALNPEELFELYFNGFYYNSSHRYIEDNKPAQNNLFSKVLENNKLLNPERSYGIDGFSNNVINALKSHKVLGLVHTTPLNYRHIISMWGADIDQDGKVKAIYVTDSDDREITFNDNSKRRIGMKRYDVLVDDNGNIRFTGKGATHKEEGAIYAGLYSLSRGDEVWEDYFKKYPEVQENL

SEQ ID NO: 90 - protein, 319 aa, synthetic construct
  VARIANT 1: note = M or absent or a signal peptide linked via a peptide bond
XTALGRRKAEDRIKETLWADGVKIDEKDFEHIKSSHEDYFAVEYGKGSGYYDVNKKMDSEDTALCVGAVVTNMFHWWVDQNRENIEKFKKQDPENNGVMKFNGVKEATVDELNHFYKEYQSNKYADQSRFFDLIKKHFGNKALNPEELFELYFNGFYYNSSHRYIEDNKPAQNNLFSKVLENNKLLNPERSYGIDGFSNNVINALKSHKVLGLVHTTPLTYRHIISMWGADIDQDGKVKAIYVTDSDDREITFNDNSKRRIGMKRYDVLVDDNGNIRFTGKGATHKEEGAIYAGLYSLSRGDEVWEDYFKKYPEVQENL

SEQ ID NO: 91 - protein, 319 aa, synthetic construct
  VARIANT 1: note = M or absent or a signal peptide linked via a peptide bond
XTALGRRKAEDRIKETLWADGVKIDEKDFEHIKSSHEDYFAVEYGKGSGYYDVNKKMDSEDTALCVGAVVTNMFHWWVDQNRENIEKFKKQDPENNGVMKFNGVKEATVDELNHFYKEYQSNKYADQSRFFDLIKKHFGNKALNPEELFELYFNGFYYNSSHRYIEDNKPAQNNLFSKVLENNKLLNPERSYGIDGFSNNVINALKSHKVLGLVHTTPLRYRHIISMWGADIDQDGKVKAIYVTDSDDREITFNDNSKRRIGMIRYDVLVDDNGNIRFTGKGATHKEEGAIYAGLYSLSRGDEVWEDYFKKYPEVQENL

SEQ ID NO: 92 - protein, 319 aa, synthetic construct
  VARIANT 1: note = M or absent or a signal peptide linked via a peptide bond
XTALGRRKAEDRIKETLWADGVKIDEKDFEHIKSSHEDYFAVEYGKGSGYYDVNKKMDSEDTALCVGAVVTNMFHWWVDQNRENIEKFKKQDPENNGVMKFNGVKEATVDELNHFYKEYQSNKYADQSRFFDLIKKHFGNKALNPEELFELYFNGFYYNSSHRYIEDNKPAQNNLFSKVLENNKLLNPERSYGIDGFSNNVINALKSHKVLGLVHTTPLRYRHIISMWGADIDQDGKVKAIYVTDSDDRDITFNDNSKRRIGMKRYDVLVDDNGNIRFTGKGATHKEEGAIYAGLYSLSRGDEVWEDYFKKYPEVQENL

SEQ ID NO: 93 - protein, 319 aa, synthetic construct
  VARIANT 1: note = M or absent or a signal peptide linked via a peptide bond
XTALGRRKAEDRIKETLWADGVKIDEKDFEHIKSSHEDYFAVEYGKGSGYYDVNKKMDSEDTALCVGAVVTNMFHWWVDQNRENIEKFKKQDPENNGVMKFNGVKEATVDELNHFYKEYQSNKYADQSRFFDLIKKHFGNKALNPEELFELYFNGFYYNSSHRYIEDNKPAQNNLFSKVLENNKLLNPERSYGIDGFSNNVINALKSHKVLGLVHTTPLRYRHIISMWGADIDQDGKVKAIYVTDSDDRNITFNDNSKRRIGMKRYDVLVDDNGNIRFTGKGATHKEEGAIYAGLYSLSRGDEVWEDYFKKYPEVQENL

SEQ ID NO: 94-95 - skipped (2 entries)

SEQ ID NO: 96 - protein, 319 aa, synthetic construct
  VARIANT 1: note = M or absent or a signal peptide linked via a peptide bond
XTALGRRKAEDRIKETLWADGVKIDEKDFEHIKSSHEDYFAVEYGKGSGYYDVNKKMDSEDTALCVGAVVTNMFHWWVDQNRENIEKFKKQDPENNGVMKFNGVKEATVDELNHFYKEYQSNKYADQSRFFDLIKKHFGNKALNPEELFELYFNGFYYNSSHRYIEDNKPAQNNLFSKVLENNKLLNPERSYGIDGFSNNVINALKSHKVLGLVHTTPLRYRHIISMWGADIDQDGKVKAIYVTDSDDRSITFNDNSKRRIGMKRYDVLVDDNGNIRFTGKGATHKEEGAIYAGLYSLSRGDEVWEDYFKKYPEVQENL

SEQ ID NO: 97 - protein, 319 aa, synthetic construct
  VARIANT 1: note = M or absent or a signal peptide linked via a peptide bond
XTALGRRKAEDRIKETLWADGVKIDEKDFEHIKSSHEDYFAVEYGKGSGYYDVNKKMDSEDTALCVGAVVTNMFHWWVDQNRENIEKFKKQDPENNGVMKFNGVKEATVDELNHFYKEYQSNKYADQSRFFDLIKKHFGNKALNPEELFELYFNGFYYNSSHRYIEDNKPAQNNLFSKVLENNKLLNPERSYGIDGFSNNVINALKSHKVLGLVHTTPLRYRHIISMWGADIDQDGKVKAIYVTDSDDREITFNDNSNRRIGMKRYDVLVDDNGNIRFTGKGATHKEEGAIYAGLYSLSRGDEVWEDYFKKYPEVQENL

SEQ ID NO: 98 - protein, 319 aa, synthetic construct
  VARIANT 1: note = M or absent or a signal peptide linked via a peptide bond
XTALGRRKAEDRIKETLWADGVKIDEKDFEHIKSSHEDYFAVEYGKGSGYYDVNKKMDSEDTALCVGAVVTNMFHWWVDQNRENIEKFKKQDPENNGVMKFNGVKEATVDELNHFYKEYQSNKYADQSRFFDLIKKHFGNKALNPEELFELYFNGFYYNSSHRYIEDNKPAQNNLFSKVLENNKLLNPERSYGIDGFSNNVINALKSHKVLGLVHTTPLRYRHIISMWGADIDQDGKVKAIYVTDSDDREITFNDNSERRIGMKRYDVLVDDNGNIRFTGKGATHKEEGAIYAGLYSLSRGDEVWEDYFKKYPEVQENL

SEQ ID NO: 99 - protein, 319 aa, synthetic construct
  VARIANT 1: note = M or absent or a signal peptide linked via a peptide bond
XTALGRRKAEDRIKETLWADGVKIDEKDFEHIKSSHEDYFAVEYGKGSGYYDVNKKMDSEDTALCVGAVVTNMFHWWVDQNRENIEKFKKQDPENNGVMKFNGVKEATVDELNHFYKEYQSNKYADQSRFFDLIKKHFGNKALNPEELFELYFNGFYYNSSHRYIEDNKPAQNNLFSKVLENNKLLNPERSYGIDGFSNNVINALKSHKVLGLVHTTPLRYRHIISMWGADIDQDGKVKAIYVTDSDDREITFNDNSDRRIGMKRYDVLVDDNGNIRFTGKGATHKEEGAIYAGLYSLSRGDEVWEDYFKKYPEVQENL

SEQ ID NO: 100 - protein, 319 aa, synthetic construct
  VARIANT 1: note = M or absent or a signal peptide linked via a peptide bond
XTALGRRKAEDRIKETLWADGVKIDEKDFEHIKSSHEDYFAVEYGKGSGYYDVNKKMDSEDTALCVGAVVTNMFHWWVDQNRENIEKFKKQDPENNGVMKFNGVKEATVDELNHFYKEYQSNKYADQSRFFDLIKKHFGNKALNPEELFELYFNGFYYNSSHRYIEDNKPAQNNLFSKVLENNKLLNPERSYGIDGFSNNVINALKSHKVLGLVHTTPLRYRHIISMWGADIDQDGKVKAIYVTDSDDREITFNDNSQRRIGMKRYDVLVDDNGNIRFTGKGATHKEEGAIYAGLYSLSRGDEVWEDYFKKYPEVQENL

SEQ ID NO: 101 - protein, 319 aa, synthetic construct
  VARIANT 1: note = M or absent or a signal peptide linked via a peptide bond
XTALGRRKAEDRIKETLWADGVKIDEKDFEHIKSSHEDYFAVEYGKGSGYYDVNKKMDSEDTALCVGAVVTNMFHWWVDQNRENIEKFKKQDPENNGVMKFNGVKEATVDELNHFYKEYQSNKYADQSRFFDLIKKHFGNKALNPEELFELYFNGFYYNSSHRYIEDNKPAQNNLFSKVLENNKLLNPERSYGIDGFSNNVINALKSHKVLGLVHTTPLRYRHIISMWGADIDQDGKVKAIYVTDSDDREITFNDNSPRRIGMKRYDVLVDDNGNIRFTGKGATHKEEGAIYAGLYSLSRGDEVWEDYFKKYPEVQENL

SEQ ID NO: 102 - protein, 319 aa, synthetic construct
  VARIANT 1: note = M or absent or a signal peptide linked via a peptide bond
XTALGRRKAEDRIKETLWADGVKIDEKDFEHIKSSHEDYFAVEYGKGSGYYDVNKKMDSEDTALCVGAVVTNMFHWWVDQNRENIEKFKKQDPENNGVMKFNGVKEATVDELNHFYKEYQSNKYADQSRFFDLIKKHFGNKALNPEELFELYFNGFYYNSSHRYIEDNKPAQNNLFSKVLENNKLLNPERSYGIDGFSNNVINALKSHKVLGLVHTTPLRYRHIISMWGADIDQDGKVKAIYVTDSDDREITFNDNSFRRIGMKRYDVLVDDNGNIRFTGKGATHKEEGAIYAGLYSLSRGDEVWEDYFKKYPEVQENL

SEQ ID NO: 103 - protein, 319 aa, synthetic construct
  VARIANT 1: note = M or absent or a signal peptide linked via a peptide bond
XTALGRRKAEDRIKETLWADGVKIDEKDFEHIKSSHEDYFAVEYGKGSGYYDVNKKMDSEDTALCVGAVVTNMFHWWVDQNRENIEKFKKQDPENNGVMKFNGVKEATVDELNHFYKEYQSNKYADQSRFFDLIKKHFGNKALNPEELFELYFNGFYYNSSHRYIEDNKPAQNNLFSKVLENNKLLNPERSYGIDGFSNNVINALKSHKVLGLVHTTPLRYRHIISMWGADIDQDGKVKAIYVTDSDDREITFNDNSVRRIGMKRYDVLVDDNGNIRFTGKGATHKEEGAIYAGLYSLSRGDEVWEDYFKKYPEVQENL

SEQ ID NO: 104 - protein, 319 aa, synthetic construct
  VARIANT 1: note = M or absent or a signal peptide linked via a peptide bond
XTALGRRKAEDRIKETLWADGVKIDEKDFEHIKSSHEDYFAVEYGKGSGYYDVNKKMDSEDTALCVGAVVTNMFHWWVDQNRENIEKFKKQDPENNGVMKFNGVKEATVDELNHFYKEYQSNKYADQSRFFDLIKKHFGNKALNPEELFELYFNGFYYNSSHRYIEDNKPAQNNLFSKVLENNKLLNPERSYGIDGFSNNVINALKSHKVLGLVHTTPLRYRHIISMWGADIDQDGKVKAIYVTDSDDREITFNDNSLRRIGMKRYDVLVDDNGNIRFTGKGATHKEEGAIYAGLYSLSRGDEVWEDYFKKYPEVQENL

SEQ ID NO: 105 - protein, 319 aa, synthetic construct
  VARIANT 1: note = M or absent or a signal peptide linked via a peptide bond
XTALGRRKAEDRIKETLWADGVKIDEKDFEHIKSSHEDYFAVEYGKGSGYYDVNKKMDSEDTALCVGAVVTNMFHWWVDQNRENIEKFKKQDPENNGVMKFNGVKEATVDELNHFYKEYQSNKYADQSRFFDLIKKHFGNKALNPEELFELYFNGFYYNSSHRYIEDNKPAQNNLFSKVLENNKLLNPERSYGIDGFSNNVINALKSHKVLGLVHTTPLRYRHIISMWGADIDQDGKVKAIYVTDSDDREITFNDNSSRRIGMKRYDVLVDDNGNIRFTGKGATHKEEGAIYAGLYSLSRGDEVWEDYFKKYPEVQENL

SEQ ID NO: 106 - protein, 319 aa, synthetic construct
  VARIANT 1: note = M or absent or a signal peptide linked via a peptide bond
XTALGRRKAEDRIKETLWADGVKIDEKDFEHIKSSHEDYFAVEYGKGSGYYDVNKKMDSEDTALCVGAVVTNMFHWWVDQNRENIEKFKKQDPENNGVMKFNGVKEATVDELNHFYKEYQSNKYADQSRFFDLIKKHFGNKALNPEELFELYFNGFYYNSSHRYIEDNKPAQNNLFSKVLENNKLLNPERSYGIDGFSNNVINALKSHKVLGLVHTTPLRYRHIISMWGADIDQDGKVKAIYVTDSDDREITFNDNSIRRIGMKRYDVLVDDNGNIRFTGKGATHKEEGAIYAGLYSLSRGDEVWEDYFKKYPEVQENL

SEQ ID NO: 107 - protein, 319 aa, synthetic construct
  VARIANT 1: note = M or absent or a signal peptide linked via a peptide bond
XTALGRRKAEDRIKETLWADGVKIDEKDFEHIKSSHEDYFAVEYGKGSGYYDVNKKMDSEDTALCVGAVVTNMFHWWVDQNRENIEKFKKQDPENNGVMKFNGVKEATVDELNHFYKEYQSNKYADQSRFFDLIKKHFGNEALNPEELFELYFNGFYYNSSHRYIEDNKPAQNNLFSKVLENNKLLNPERSYGIDGFSNNVINALKSHKVLGLVHTTPLRYRHIISMWGADIDQDGKVKAIYVTDSDDREITFNDNSKRRIGMKRYDVLVDDNGNIRFTGKGATHKEEGAIYAGLYSLSRGDEVWEDYFKKYPEVQENL

SEQ ID NO: 108 - protein, 319 aa, synthetic construct
  VARIANT 1: note = M or absent or a signal peptide linked via a peptide bond
XTALGRRKAEDRIKETLWADGVKIDEKDFEHIKSSHEDYFAVEYGKGSGYYDVNKKMDSEDTALCVGAVVTNMFHWWVDQNRENIEKFKKQDPENNGVMKFNGVKEATVDELNHFYKEYQSNKYADQSRFFDLIKKHFGNSALNPEELFELYFNGFYYNSSHRYIEDNKPAQNNLFSKVLENNKLLNPERSYGIDGFSNNVINALKSHKVLGLVHTTPLRYRHIISMWGADIDQDGKVKAIYVTDSDDREITFNDNSKRRIGMKRYDVLVDDNGNIRFTGKGATHKEEGAIYAGLYSLSRGDEVWEDYFKKYPEVQENL

SEQ ID NO: 109 - protein, 319 aa, synthetic construct
  VARIANT 1: note = M or absent or a signal peptide linked via a peptide bond
XTALGRRKAEDRIKETLWADGVKIDEKDFEHIKSSHEDYFAVEYGKGSGYYDVNKKMDSEDTALCVGAVVTNMFHWWVDQNRENIEKFKKQDPENNGVMKFNGVKEATVDELNHFYKEYQSNKYADQSRFFDLIKKSFGNKALNPEELFELYFNGFYYNSSHRYIEDNKPAQNNLFSKVLENNKLLNPERSYGIDGFSNNVINALKSHKVLGLVHTTPLRYRHIISMWGADIDQDGKVKAIYVTDSDDREITFNDNSKRRIGMKRYDVLVDDNGNIRFTGKGATHKEEGAIYAGLYSLSRGDEVWEDYFKKYPEVQENL

SEQ ID NO: 110 - protein, 319 aa, synthetic construct
  VARIANT 1: note = M or absent or a signal peptide linked via a peptide bond
XTALGRRKAEDRIKETLWADGVKIDEKDFEHIKSSHEDYFAVEYGKGSGYYDVNKKMDSEDTALCVGAVVTNMFHWWVDQNRENIEKFKKQDPENNGVMEFNGVKEATVDELNHFYKEYQSNKYADQSRFFDLIKKHFGNKALNPEELFELYFNGFYYNSSHRYIEDNKPAQNNLFSKVLENNKLLNPERSYGIDGFSNNVINALKSHKVLGLVHTTPLRYRHIISMWGADIDQDGKVKAIYVTDSDDREITFNDNSKRRIGMKRYDVLVDDNGNIRFTGKGATHKEEGAIYAGLYSLSRGDEVWEDYFKKYPEVQENL

SEQ ID NO: 111 - protein, 319 aa, synthetic construct
  VARIANT 1: note = M or absent or a signal peptide linked via a peptide bond
XTALGRRKAEDRIKETLWADGVKIDEKDFEHIKSSHEDYFAVEYGKGSGYYDVNKKMDSEDTALCVGAVVTNMFHWWVDQNRENIEKFKKQDPENNGVMKFNGVEEATVDELNHFYKEYQSNKYADQSRFFDLIKKHFGNKALNPEELFELYFNGFYYNSSHRYIEDNKPAQNNLFSKVLENNKLLNPERSYGIDGFSNNVINALKSHKVLGLVHTTPLRYRHIISMWGADIDQDGKVKAIYVTDSDDREITFNDNSKRRIGMKRYDVLVDDNGNIRFTGKGATHKEEGAIYAGLYSLSRGDEVWEDYFKKYPEVQENL

SEQ ID NO: 112 - protein, 319 aa, synthetic construct
  VARIANT 1: note = M or absent or a signal peptide linked via a peptide bond
XTALGRRKAEDRIKETLWADGVKIDEKDFEHIKSSHEDYFAVEYGKGSGYYDVNKKMDSEDTALCVGAVVTNMFHWWVDQNRENIEKFKKQDPENNGVMKFNGVKEATVDELNHFYKEYQSNKYADQSRFFDLIKKHFGNKALNPEELFELYFNGFYYNSSHRYIEDNKPAQNNLFSKVLENNKLLNPERSYGIDGFSNNVINALKSHKVLGLVHTTPLRYRHIISMWGADIDQDGKVKAIYVTDSDDGEITFNDNSKRRIGMKRYDVLVDDNGNIRFTGKGATHKEEGAIYAGLYSLSRGDEVWEDYFKKYPEVQENL

SEQ ID NO: 113 - protein, 319 aa, synthetic construct
  VARIANT 1: note = M or absent or a signal peptide linked via a peptide bond
XTALGRRKAEDRIKETLWADGVKIDEKDFEHIKSSHEDYFAVEYGKGSGYYDVNKKMDSEDTALCVGAVVTNMFHWWVDQNRENIEKFKKQDPENNGVMKFNGVKEATVDELNHFYKEYQSNKYADQSRFFDLIKKHFGNKALNPEELFELYFNGFYYNSSHRYIEDNKPAQNNLFSKVLENNKLLNPERSYGIDGFSNNVINALKSHKVLGLVHTTPLRYRHIISMWGADIDQDGKVKAIYVTDSDDREITFNDNSKERIGMKRYDVLVDDNGNIRFTGKGATHKEEGAIYAGLYSLSRGDEVWEDYFKKYPEVQENL

SEQ ID NO: 114 - protein, 319 aa, synthetic construct
  VARIANT 1: note = M or absent or a signal peptide linked via a peptide bond
XTALGRRKAEDRIKETLWADGVKIDEKDFEHIKSSHEDYFAVEYGKGSGYYDVNKKMDSEDTALCVGAVVTNMFHWWVDQNRENIEKFKKQDPENNGVMKFNGVKEATVDELNHFYKEYQSNKYADQSRFFDLIKKHFGNKALNPEELFELYFNGFYYNSSHRYIEDNKPAQNNLFSKVLENNKLLNPERSYGIDGFSNNVINALKSHKVLGLVHTTPLRYRHIISMWGADIDQDGKVKAIYVTDSDDREITFNDNSKTRIGMKRYDVLVDDNGNIRFTGKGATHKEEGAIYAGLYSLSRGDEVWEDYFKKYPEVQENL

SEQ ID NO: 115 - protein, 319 aa, synthetic construct
  VARIANT 1: note = M or absent or a signal peptide linked via a peptide bond
XTALGRRKAEDRIKETLWADGVKIDEKDFEHIKSSHEDYFAVEYGKGSGYYDVNKKMDSEDTALCVGAVVTNMFHWWVDQNRENIEKFKKQDPENNGVMKFNGVKEATVDELNHFYKEYQSNKYADQSRFFDLIKKHFGNKALNPEELFELYFNGFYYNSSHRYIEDNKPAQNNLFSKVLENNKLLNPERSYGIDGFSNNVINALKSHKVLGLVHTTPLRYRHIISMWGADIDQDGKVKAIYVTDSDDREITFNDNSKRQIGMKRYDVLVDDNGNIRFTGKGATHKEEGAIYAGLYSLSRGDEVWEDYFKKYPEVQENL

SEQ ID NO: 116 - protein, 319 aa, synthetic construct
  VARIANT 1: note = M or absent or a signal peptide linked via a peptide bond
XTALGRRKAEDRIKETLWADGVKIDEKDFEHIKSSHEDYFAVEYGKGSGYYDVNKKMDSEDTALCVGAVVTNMFHWWVDQNRENIEKFKKQDPENNGVMKFNGVKEATVDELNHFYKEYQSNKYADQSRFFDLIKKHFGNKALNPEELFELYFNGFYYNSSHRYIEDNKPAQNNLFSKVLENNKLLNPERSYGIDGFSNNVINALKSHKVLGLVHTTPLRYRHIISMWGADIDQDGKVKAIYVTDSDDREITFNDNSKRLIGMKRYDVLVDDNGNIRFTGKGATHKEEGAIYAGLYSLSRGDEVWEDYFKKYPEVQENL

SEQ ID NO: 117 - protein, 319 aa, synthetic construct
  VARIANT 1: note = M or absent or a signal peptide linked via a peptide bond
XTALGRRKAEDRIKETLWVDGVKIDEKDFEHIKSSHEDYFAVEYGKGSGYYDVNKKMDSEDTALCVGAVVTNMFHWWVDQNRENIEKFKKQDPENNGVMKFNGVKEATVDELNHFYKEYQSNKYADQSKFFDLIKKHFGNKALNPEELFELYFNGFYYNSSQRYIEDNKPAQNNLFSKVLENNKLLNPERSYGIDGFSNNVINALKSHKVLGLVHTTPLRYRHIISMWGADIDQDGKVKAIYVTDSDDREITFNDNSKRRIGMKRYDVLVDDNGNIRFTGKGATHKEEGAIYAGLYSLSRGDEVWEDYFKKYPEVQENL

SEQ ID NO: 118 - protein, 319 aa, synthetic construct
  VARIANT 1: note = M or absent or a signal peptide linked via a peptide bond
XTALGRRKAEERIKETLWVDGVKIDEKDFEHIKSSHEDYFAVEYGKGSGYYDVNKKMDSEDTALCVGAVVTNMFHWWVDQNRENIEKFKKQDPENNGVMKFNGVKEATVDELNHFYKEYQSNKYADQSRFFDLIKKHFGNKALNPEELFELYFNGFYYNSSQRYIEDNKPAQNNLFSKVLENNKLLNPERSYGIDGFSNNVINALKSHKVLGLVHTTPLRYRHIISMWGADIDQDGKVKAIYVTDSDDREITFNDNSKRRIGMKRYDVLVDDNGNIRFTGKGATHKEEGAIYAGLYSLSRGDEVWEDYFKKYPEVQENL

SEQ ID NO: 119 - protein, 319 aa, synthetic construct
  VARIANT 1: note = M or absent or a signal peptide linked via a peptide bond
XTALGRRKAEERIKETLWVDGVKIDEKDFEHIKSSHEDYFAVEYGKGSGYYDVNKKMDSEDTALCVGAVVTNMFHWWVDQNRENIEKFKKQDPENNGVMKFNGVKEATVDELNHFYKEYQSNKYADQSKFFDLIKKHFGNKALNPEELFELYFNGFYYNSSHRYIEDNKPAQNNLFSKVLENNKLLNPERSYGIDGFSNNVINALKSHKVLGLVHTTPLRYRHIISMWGADIDQDGKVKAIYVTDSDDREITFNDNSKRRIGMKRYDVLVDDNGNIRFTGKGATHKEEGAIYAGLYSLSRGDEVWEDYFKKYPEVQENL

SEQ ID NO: 120 - protein, 319 aa, synthetic construct
  VARIANT 1: note = M or absent or a signal peptide linked via a peptide bond
XTALGRRKAEERIKETLWADGVKIDEKDFEHIKSSHEDYFAVEYGKGSGYYDVNKKMDSEDTALCVGAVVTNMFHWWVDQNRENIEKFKKQDPENNGVMKFNGVKEATVDELNHFYKEYQSNKYADQSKFFDLIKKHFGNKALNPEELFELYFNGFYYNSSQRYIEDNKPAQNNLFSKVLENNKLLNPERSYGIDGFSNNVINALKSHKVLGLVHTTPLRYRHIISMWGADIDQDGKVKAIYVTDSDDREITFNDNSKRRIGMKRYDVLVDDNGNIRFTGKGATHKEEGAIYAGLYSLSRGDEVWEDYFKKYPEVQENL

SEQ ID NO: 121 - protein, 319 aa, synthetic construct
  VARIANT 1: note = M or absent or a signal peptide linked via a peptide bond
XTALGRRKAEDRIKETLWADGVKIDEKDFEHIKSSHEDYFAVEYGKGSGYYDVNKKMDSEDTALCVGAVVTNMFHWWVDQNRENIEKFKKQDPENNGVMKFEGVKEATVDELNHFYKEYQSNKYADQSRFFDLIKKHFGNKALNPEELFELYFNGFYYNSSHRYIEDNEPAQNNLFSKVLENNKLLNPERSYGIDGFSNNVINALKSHKVLGLVHTTPLRYRHIISMWGADIDQDGKVKAIYVTDSDDREITFNDNSKRRIGMIRYDVLVDDNGNIRFTGKGATHKEEGAIYAGLYSLSRGDEVWEDYFKKYPEVQENL

SEQ ID NO: 122 - protein, 319 aa, synthetic construct
  VARIANT 1: note = M or absent or a signal peptide linked via a peptide bond
XTALGRRKAEDRIKETLWADGVKIDEKDFEHIKSSHEDYFAVEYGKGSGYYDVNKKMDSEDTALCVGAVVTNMFHWWVDQNRENIEKFKKQDPENNGVMKFEGVKEATVDELNHFYKEYQSNKYADQSRFFDLIKDHFGNKALNPEELFELYFNGFYYNSSHRYIEDNEPAQNNLFSKVLENNKLLNPERSYGIDGFSNNVINALKSHKVLGLVHTTPLRYRHIISMWGADIDQDGKVKAIYVTDSDDREITFNDNSKRRIGMIRYDVLVDDNGNIRFTGKGATHKEEGAIYAGLYSLSRGDEVWEDYFKKYPEVQENL

SEQ ID NO: 123 - protein, 319 aa, synthetic construct
  VARIANT 1: note = M or absent or a signal peptide linked via a peptide bond
XTALGRRKAEDRIKETLWADGVKIDEKDFEHIKSSHEDYFAVEYGKGSGYYDVNKKMDSEDTALCVGAVVTNMFHWWVDQNRENIEKFKKQDPENNGVMKFEGVKEATVDELNHFYKEYQSNKYADQSRFFDLIKKHFGNKALNPEELFELYFNGFYYNSSHRYIEDNEPAQNNLFSKVLENNKLLNPERSYGIDGFSNNVINALKSHKVLGLVHTTPLTYRHIISMWGADIDQDGKVKAIYVTDSDDREITFNDNSKRRIGMIRYDVLVDDNGNIRFTGKGATHKEEGAIYAGLYSLSRGDEVWEDYFKKYPEVQENL

SEQ ID NO: 124 - protein, 319 aa, synthetic construct
  VARIANT 1: note = M or absent or a signal peptide linked via a peptide bond
XTALGRRKAEDRIKETLWADGVKIDEKDFEHIKSSHEDYFAVEYGKGSGYYDVNKKMDSEDTALCVGAVVTNMFHWWVDQNRENIEKFKKQDPENNGVMKFEGVKEATVDELNHFYKEYQSNKYADQSRFFDLIKDHFGNKALNPEELFELYFNGFYYNSSHRYIEDNEPAQNNLFSKVLENNKLLNPERSYGIDGFSNNVINALKSHKVLGLVHTTPLTYRHIISMWGADIDQDGKVKAIYVTDSDDREITFNDNSKRRIGMIRYDVLVDDNGNIRFTGKGATHKEEGAIYAGLYSLSRGDEVWEDYFKKYPEVQENL

SEQ ID NO: 125 - protein, 319 aa, synthetic construct
  VARIANT 1: note = M or absent or a signal peptide linked via a peptide bond
XTALGRRKAEDRIKETLWADGVKIDEKDFEHIKSSHEDYFAVEYGKGSGYYDVNKKMDSEDTALCVGAVVTNMFHWWVDQNRENIEKFKKQDPENNGVMKFNGVKEATVDELNHFYKEYQSNKYADQSRFFDLIKDHFGNKALNPEELFELYFNGFYYNSSHRYIEDNKPAQNNLFSKVLENNKLLNPERSYGIDGFSNNVINALKSHKVLGLVHTTPLRYRHIISMWGADIDQDGKVKAIYVTDSDDREITFNDNSKRRIGMIRYDVLVDDNGNIRFTGKGATHKEEGAIYAGLYSLSRGDEVWEDYFKKYPEVQENL

SEQ ID NO: 126 - protein, 319 aa, synthetic construct
  VARIANT 1: note = M or absent or a signal peptide linked via a peptide bond
XTALGRRKAEDRIKETLWADGVKIDEKDFEHIKSSHEDYFAVEYGKGSGYYDVNKKMDSEDTALCVGAVVTNMFHWWVDQNRENIEKFKKQDPENNGVMKFNGVKEATVDELNHFYKEYQSNKYADQSRFFDLIKKHFGNKALNPEELFELYFNGFYYNSSHRYIEDNKPAQNNLFSKVLENNKLLNPERSYGIDGFSNNVINALKSHKVLGLVHTTPLTYRHIISMWGADIDQDGKVKAIYVTDSDDREITFNDNSKRRIGMIRYDVLVDDNGNIRFTGKGATHKEEGAIYAGLYSLSRGDEVWEDYFKKYPEVQENL

SEQ ID NO: 127 - protein, 319 aa, synthetic construct
  VARIANT 1: note = M or absent or a signal peptide linked via a peptide bond
XTALGRRKAEDRIKETLWADGVKIDEKDFEHIKSSHEDYFAVEYGKGSGYYDVNKKMDSEDTALCVGAVVTNMFHWWVDQNRENIEKFKKQDPENNGVMKFNGVKEATVDELNHFYKEYQSNKYADQSRFFDLIKDHFGNKALNPEELFELYFNGFYYNSSHRYIEDNKPAQNNLFSKVLENNKLLNPERSYGIDGFSNNVINALKSHKVLGLVHTTPLTYRHIISMWGADIDQDGKVKAIYVTDSDDREITFNDNSKRRIGMIRYDVLVDDNGNIRFTGKGATHKEEGAIYAGLYSLSRGDEVWEDYFKKYPEVQENL

SEQ ID NO: 128 - protein, 319 aa, synthetic construct
  VARIANT 1: note = M or absent or a signal peptide linked via a peptide bond
XTALGRRKAEDRIKETLWADGVKIDEKDFEHIKSSHEDYFAVEYGKGSGYYDVNKKMDSEDTALCVGAVVTNMFHWWVDQNRENIEKFKKQDPENNGVMKFEGVKEATVDELNHFYKEYQSNKYADQSRFFDLIKSHFGNKALNPEELFELYFNGFYYNSSHRYIEDNEPAQNNLFSKVLENNKLLNPERSYGIDGFSNNVINALKSHKVLGLVHTTPLRYRHIISMWGADIDQDGKVKAIYVTDSDDREITFNDNSKRRIGMIRYDVLVDDNGNIRFTGKGATHKEEGAIYAGLYSLSRGDEVWEDYFKKYPEVQENL

SEQ ID NO: 129 - protein, 319 aa, synthetic construct
  VARIANT 1: note = M or absent or a signal peptide linked via a peptide bond
XTALGRRKAEDRIKETLWADGVKIDEKDFEHIKSSHEDYFAVEYGKGSGYYDVNKKMDSEDTALCVGAVVTNMFHWWVDQNRENIEKFKKQDPENNGVMKFEGVKEATVDELNHFYKEYQSNKYADQSRFFDLIKSHFGNKALNPEELFELYFNGFYYNSSHRYIEDNEPAQNNLFSKVLENNKLLNPERSYGIDGFSNNVINALKSHKVLGLVHTTPLTYRHIISMWGADIDQDGKVKAIYVTDSDDREITFNDNSKRRIGMIRYDVLVDDNGNIRFTGKGATHKEEGAIYAGLYSLSRGDEVWEDYFKKYPEVQENL

SEQ ID NO: 130 - protein, 319 aa, synthetic construct
  VARIANT 1: note = M or absent or a signal peptide linked via a peptide bond
XTALGRRKAEDRIKETLWADGVKIDEKDFEHIKSSHEDYFAVEYGKGSGYYDVNKKMDSEDTALCVGAVVTNMFHWWVDQNRENIEKFKKQDPENNGVMKFEGVKEATVDELNHFYKEYQSNKYADQSRFFDLIKKHFGNKALNPEELFELYFNGFYYNSSQRYIEDNEPAQNNLFSKVLENNKLLNPERSYGIDGFSNNVINALKSHKVLGLVHTTPLTYRHIISMWGADIDQDGKVKAIYVTDSDDREITFNDNSKRRIGMIRYDVLVDDNGNIRFTGKGATHKEEGAIYAGLYSLSRGDEVWEDYFKKYPEVQENL

SEQ ID NO: 131 - protein, 319 aa, synthetic construct
  VARIANT 1: note = M or absent or a signal peptide linked via a peptide bond
XTALGRRKAEDRIKETLWADGVKIDEKDFEHIKSSHEDYFAVEYGKGSGYYDVNKKMDSEDTALCVGAVVTNMFHWWVDQNRENIEKFKKQDPENNGVMKFEGVKEATVDELNHFYKEYQSNKYADQSRFFDLIKDHFGNKALNPEELFELYFNGFYYNSSQRYIEDNEPAQNNLFSKVLENNKLLNPERSYGIDGFSNNVINALKSHKVLGLVHTTPLTYRHIISMWGADIDQDGKVKAIYVTDSDDREITFNDNSKRRIGMIRYDVLVDDNGNIRFTGKGATHKEEGAIYAGLYSLSRGDEVWEDYFKKYPEVQENL

SEQ ID NO: 132 - protein, 319 aa, synthetic construct
  VARIANT 1: note = M or absent or a signal peptide linked via a peptide bond
XTALGRRKAEDRIKETLWADGVKIDEKDFEHIKSSHEDYFAVEYGKGSGYYDVNKKMDSEDTALCVGAVVTNMFHWWVDQNRENIEKFKKQDPENNGVMKFEGVKEATVDELNHFYKEYQSNKYADQSRFFDLIKSHFGNKALNPEELFELYFNGFYYNSSQRYIEDNEPAQNNLFSKVLENNKLLNPERSYGIDGFSNNVINALKSHKVLGLVHTTPLTYRHIISMWGADIDQDGKVKAIYVTDSDDREITFNDNSKRRIGMIRYDVLVDDNGNIRFTGKGATHKEEGAIYAGLYSLSRGDEVWEDYFKKYPEVQENL

SEQ ID NO: 133 - protein, 319 aa, synthetic construct
  VARIANT 1: note = M or absent or a signal peptide linked via a peptide bond
XTALGRRKAEDRIKETLWADGVKIDEKDFEHIKSSHEDYFAVEYGKGSGYYDVNKKMDSEDTALCVGAVVTNMFHWWVDQNRENIEKFKKQDPENNGVMKFNGVKEATVDELNHFYKEYQSNKYADQSRFFDLIKKHFGNKALNPEELFELYFNGFYYNSSHRYIEDNKPAQNNLFSKVLENNKLLNPERSYGIDGFSNNVINALKSHKVLGLVHTTPLRYRHIISMWGADIDQDGKVKAIYVTDSDDREITFNDNSSRRIGMIRYDVLVDDNGNIRFTGKGATHKEEGAIYAGLYSLSRGDEVWEDYFKKYPEVQENL

SEQ ID NO: 134 - protein, 319 aa, synthetic construct
  VARIANT 1: note = M or absent or a signal peptide linked via a peptide bond
XTALGRRKAEDRIKETLWADGVKIDEKDFEHIKSSHEDYFAVEYGKGSGYYDVNKKMDSEDTALCVGAVVTNMFHWWVDQNRENIEKFKKQDPENNGVMKFEGVKEATVDELNHFYKEYQSNKYADQSRFFDLIKKHFGNKALNPEELFELYFNGFYYNSSHRYIEDNEPAQNNLFSKVLENNKLLNPERSYGIDGFSNNVINALKSHKVLGLVHTTPLRYRHIISMWGADIDQDGKVKAIYVTDSDDREITFNDNSSRRIGMIRYDVLVDDNGNIRFTGKGATHKEEGAIYAGLYSLSRGDEVWEDYFKKYPEVQENL

SEQ ID NO: 135 - protein, 319 aa, synthetic construct
  VARIANT 1: note = M or absent or a signal peptide linked via a peptide bond
XTALGRRKAEDRIKETLWADGVKIDEKDFEHIKSSHEDYFAVEYGKGSGYYDVNKKMDSEDTALCVGAVVTNMFHWWVDQNRENIEKFKKQDPENNGVMKFEGVKEATVDELNHFYKEYQSNKYADQSRFFDLIKKHFGNKALNPEELFELYFNGFYYNSSHRYIEDNEPAQNNLFSKVLENNKLLNPERSYGIDGFSNNVINALKSHKVLGLVHTTPLTYRHIISMWGADIDQDGKVKAIYVTDSDDREITFNDNSSRRIGMIRYDVLVDDNGNIRFTGKGATHKEEGAIYAGLYSLSRGDEVWEDYFKKYPEVQENL

SEQ ID NO: 136 - protein, 319 aa, synthetic construct
  VARIANT 1: note = M or absent or a signal peptide linked via a peptide bond
XTALGRRKAEDRIKETLWADGVKIDEKDFEHIKSSHEDYFAVEYGKGSGYYDVNKKMDSEDTALCVGAVVTNMFHWWVDQNRENIEKFKKQDPENNGVMKFNGVKEATVDELNHFYKEYQSNKYADQSRFFDLIKKHFGNKALNPEELFELYFNGFYYNSSHRYIEDNKPAQNNLFSKVLENNKLLNPERSYGIDGFSNNVINALKSHKVLGLVHTTPLRYRHIISMWGADIDQDGKVKAIYVTDSDDREITFNDNSKRWIGMIRYDVLVDDNGNIRFTGKGATHKEEGAIYAGLYSLSRGDEVWEDYFKKYPEVQENL

SEQ ID NO: 137 - protein, 319 aa, synthetic construct
  VARIANT 1: note = M or absent or a signal peptide linked via a peptide bond
XTALGRRKAEDRIKETLWADGVKIDEKDFEHIKSSHEDYFAVEYGKGSGYYDVNKKMDSEDTALCVGAVVTNMFHWWVDQNRENIEKFKKQDPENNGVMKFEGVKEATVDELNHFYKEYQSNKYADQSRFFDLIKKHFGNKALNPEELFELYFNGFYYNSSHRYIEDNEPAQNNLFSKVLENNKLLNPERSYGIDGFSNNVINALKSHKVLGLVHTTPLRYRHIISMWGADIDQDGKVKAIYVTDSDDREITFNDNSKRWIGMIRYDVLVDDNGNIRFTGKGATHKEEGAIYAGLYSLSRGDEVWEDYFKKYPEVQENL

SEQ ID NO: 138 - protein, 319 aa, synthetic construct
  VARIANT 1: note = M or absent or a signal peptide linked via a peptide bond
XTALGRRKAEDRIKETLWADGVKIDEKDFEHIKSSHEDYFAVEYGKGSGYYDVNKKMDSEDTALCVGAVVTNMFHWWVDQNRENIEKFKKQDPENNGVMKFEGVKEATVDELNHFYKEYQSNKYADQSRFFDLIKKHFGNKALNPEELFELYFNGFYYNSSHRYIEDNEPAQNNLFSKVLENNKLLNPERSYGIDGFSNNVINALKSHKVLGLVHTTPLTYRHIISMWGADIDQDGKVKAIYVTDSDDREITFNDNSKRWIGMIRYDVLVDDNGNIRFTGKGATHKEEGAIYAGLYSLSRGDEVWEDYFKKYPEVQENL

SEQ ID NO: 139 - protein, 319 aa, synthetic construct
  VARIANT 1: note = M or absent or a signal peptide linked via a peptide bond
XTALGRRKAEDRIKETLWADGVKIDEKDFEHIKSSHEDYFAVEYGKGSGYYDVNKKMDSEDSALCVGAVVTNMFHWWVDQNRENIEKFKKQDPENNGVMKFNGVKEATVDELNHFYKEYQSNKYADQSRFFDLIKKHFGNKALNPEELFELYFNGFYYNSSHRYIEDNKPAQNNLFSKVLENNKLLNPERSYGIDGFSNNVINALKSHKVLGLVHTTPLRYRHIISMWGADIDQDGKVKAIYVTDSDDREITFNDNSKRRIGMIRYDVLVDDNGNIRFTGKGATHKEEGAIYAGLYSLSRGDEVWEDYFKKYPEVQENL

SEQ ID NO: 140 - protein, 319 aa, synthetic construct
  VARIANT 1: note = M or absent or a signal peptide linked via a peptide bond
XTALGRRKAEDRIKETLWADGVKIDEKDFEHIKSSHEDYFAVEYGKGSGYYDVNKKMDSEDSALCVGAVVTNMFHWWVDQNRENIEKFKKQDPENNGVMKFEGVKEATVDELNHFYKEYQSNKYADQSRFFDLIKKHFGNKALNPEELFELYFNGFYYNSSHRYIEDNEPAQNNLFSKVLENNKLLNPERSYGIDGFSNNVINALKSHKVLGLVHTTPLRYRHIISMWGADIDQDGKVKAIYVTDSDDREITFNDNSKRRIGMIRYDVLVDDNGNIRFTGKGATHKEEGAIYAGLYSLSRGDEVWEDYFKKYPEVQENL

SEQ ID NO: 141 - protein, 319 aa, synthetic construct
  VARIANT 1: note = M or absent or a signal peptide linked via a peptide bond
XTALGRRKAEDRIKETLWADGVKIDEKDFEHIKSSHEDYFAVEYGKGSGYYDVNKKMDSEDSALCVGAVVTNMFHWWVDQNRENIEKFKKQDPENNGVMKFEGVKEATVDELNHFYKEYQSNKYADQSRFFDLIKKHFGNKALNPEELFELYFNGFYYNSSHRYIEDNEPAQNNLFSKVLENNKLLNPERSYGIDGFSNNVINALKSHKVLGLVHTTPLTYRHIISMWGADIDQDGKVKAIYVTDSDDREITFNDNSKRRIGMIRYDVLVDDNGNIRFTGKGATHKEEGAIYAGLYSLSRGDEVWEDYFKKYPEVQENL

SEQ ID NO: 142 - protein, 319 aa, synthetic construct
  VARIANT 1: note = M or absent or a signal peptide linked via a peptide bond
XTALGRRWAEQRIKYTLWADGVKIDEKHFEHIKSSHEDYFAVEYGKGSGYYDVNKKMDSEDTALCVGAVVTNMFHWWVDQNRENIEKFKKQDPENNGVMKFNGVKEATVDELNHFYKEYQSNKYADQSRFFDLIKKHFGNKALNPEELFELYFNGFYYNSSHRYIEDNKPAQNNLFSKVLENNKLLNPERSYGIDGFSNNVINALKSHKVLGLVHTTPLRYRHIISMWGADIDQDGKVKAIYVTDSDDREITFNDNSKRRIGMIRYDVLVDDNGNIRFTGKGATHKEEGAIYAGLYSLSRGDEVWEDYFKKYPEVQENL

SEQ ID NO: 143 - protein, 319 aa, synthetic construct
  VARIANT 1: note = M or absent or a signal peptide linked via a peptide bond
XTALGRRWAEQRIKYTLWADGVKIDEKHFEHIKSSHEDYFAVEYGKGSGYYDVNKKMDSEDTALCVGAVVTNMFHWWVDQNRENIEKFKKQDPENNGVMKFEGVKEATVDELNHFYKEYQSNKYADQSRFFDLIKKHFGNKALNPEELFELYFNGFYYNSSHRYIEDNEPAQNNLFSKVLENNKLLNPERSYGIDGFSNNVINALKSHKVLGLVHTTPLRYRHIISMWGADIDQDGKVKAIYVTDSDDREITFNDNSKRRIGMIRYDVLVDDNGNIRFTGKGATHKEEGAIYAGLYSLSRGDEVWEDYFKKYPEVQENL

SEQ ID NO: 144 - protein, 319 aa, synthetic construct
  VARIANT 1: note = M or absent or a signal peptide linked via a peptide bond
XTALGRRWAEQRIKYTLWADGVKIDEKHFEHIKSSHEDYFAVEYGKGSGYYDVNKKMDSEDTALCVGAVVTNMFHWWVDQNRENIEKFKKQDPENNGVMKFEGVKEATVDELNHFYKEYQSNKYADQSRFFDLIKKHFGNKALNPEELFELYFNGFYYNSSHRYIEDNEPAQNNLFSKVLENNKLLNPERSYGIDGFSNNVINALKSHKVLGLVHTTPLTYRHIISMWGADIDQDGKVKAIYVTDSDDREITFNDNSKRRIGMIRYDVLVDDNGNIRFTGKGATHKEEGAIYAGLYSLSRGDEVWEDYFKKYPEVQENL

SEQ ID NO: 145 - protein, 319 aa, synthetic construct
  VARIANT 1: note = M or absent or a signal peptide linked via a peptide bond
XTALGRRWAEQRIKYTLWADGVKIDEKHFEHIKSSHEDYFAVEYGKGSGYYDVNKKMDSEDTALCVGAVVTNMFHWWVDQNRENIEKFKKQDPENNGVMKFEGVKEATVDELNHFYKEYQSNKYADQSRFFDLIKDHFGNKALNPEELFELYFNGFYYNSSHRYIEDNEPAQNNLFSKVLENNKLLNPERSYGIDGFSNNVINALKSHKVLGLVHTTPLTYRHIISMWGADIDQDGKVKAIYVTDSDDREITFNDNSKRRIGMIRYDVLVDDNGNIRFTGKGATHKEEGAIYAGLYSLSRGDEVWEDYFKKYPEVQENL

SEQ ID NO: 146 - protein, 319 aa, synthetic construct
  VARIANT 1: note = M or absent or a signal peptide linked via a peptide bond
XTALGRRWAEQRIKYTLWADGVKIDEKHFEHIKSSHEDYFAVEYGKGSGYYDVNKKMDSEDSALCVGAVVTNMFHWWVDQNRENIEKFKKQDPENNGVMKFNGVKEATVDELNHFYKEYQSNKYADQSRFFDLIKKHFGNKALNPEELFELYFNGFYYNSSHRYIEDNKPAQNNLFSKVLENNKLLNPERSYGIDGFSNNVINALKSHKVLGLVHTTPLRYRHIISMWGADIDQDGKVKAIYVTDSDDREITFNDNSSRWIGMIRYDVLVDDNGNIRFTGKGATHKEEGAIYAGLYSLSRGDEVWEDYFKKYPEVQENL

SEQ ID NO: 147 - protein, 319 aa, synthetic construct
  VARIANT 1: note = M or absent or a signal peptide linked via a peptide bond
XTALGRRWAEQRIKYTLWADGVKIDEKHFEHIKSSHEDYFAVEYGKGSGYYDVNKKMDSEDSALCVGAVVTNMFHWWVDQNRENIEKFKKQDPENNGVMKFEGVKEATVDELNHFYKEYQSNKYADQSRFFDLIKKHFGNKALNPEELFELYFNGFYYNSSHRYIEDNEPAQNNLFSKVLENNKLLNPERSYGIDGFSNNVINALKSHKVLGLVHTTPLRYRHIISMWGADIDQDGKVKAIYVTDSDDREITFNDNSSRWIGMIRYDVLVDDNGNIRFTGKGATHKEEGAIYAGLYSLSRGDEVWEDYFKKYPEVQENL

SEQ ID NO: 148 - protein, 319 aa, synthetic construct
  VARIANT 1: note = M or absent or a signal peptide linked via a peptide bond
XTALGRRWAEQRIKYTLWADGVKIDEKHFEHIKSSHEDYFAVEYGKGSGYYDVNKKMDSEDSALCVGAVVTNMFHWWVDQNRENIEKFKKQDPENNGVMKFEGVKEATVDELNHFYKEYQSNKYADQSRFFDLIKKHFGNKALNPEELFELYFNGFYYNSSHRYIEDNEPAQNNLFSKVLENNKLLNPERSYGIDGFSNNVINALKSHKVLGLVHTTPLTYRHIISMWGADIDQDGKVKAIYVTDSDDREITFNDNSSRWIGMIRYDVLVDDNGNIRFTGKGATHKEEGAIYAGLYSLSRGDEVWEDYFKKYPEVQENL

SEQ ID NO: 149 - protein, 319 aa, synthetic construct
  VARIANT 1: note = M or absent or a signal peptide linked via a peptide bond
XTALGRRWAEQRIKYTLWADGVKIDEKHFEHIKSSHEDYFAVEYGKGSGYYDVNKKMDSEDSALCVGAVVTNMFHWWVDQNRENIEKFKKQDPENNGVMKFEGVKEATVDELNHFYKEYQSNKYADQSRFFDLIKDHFGNKALNPEELFELYFNGFYYNSSHRYIEDNEPAQNNLFSKVLENNKLLNPERSYGIDGFSNNVINALKSHKVLGLVHTTPLTYRHIISMWGADIDQDGKVKAIYVTDSDDREITFNDNSSRWIGMIRYDVLVDDNGNIRFTGKGATHKEEGAIYAGLYSLSRGDEVWEDYFKKYPEVQENL

SEQ ID NO: 150 - protein, 319 aa, synthetic construct
  VARIANT 1: note = M or absent or a signal peptide linked via a peptide bond
XTALGRRKAEDRIKETLWADGVKIDEKDFEHIKSSHEDYFAVEYGKGSGYYDVNKKMDSEDTALCVGAVVTNMFHWWVDQNRENIEKFKKQDPENNGVMKFNGVKEATVDELNHFYKEYQSNKYADQSRFFDLIKKHFGNKALNPEELFELYFNGFYYNSSHRYIEDNKPAQNNLFSKVLENNKLLNPERSYGIDGFSNNVINALKSHKVLGLVYTTPLRYRHIISMWGADIDQDGKVKAIYVTDSDDREITFNDNSKRRIGMIRYDVLVDDNGNIRFTGKGATHKEEGAIYAGLYSLSRGDEVWEDYFKKYPEVQENL

SEQ ID NO: 151 - protein, 319 aa, synthetic construct
  VARIANT 1: note = M or absent or a signal peptide linked via a peptide bond
XTALGRRKAEDRIKETLWADGVKIDEKDFEHIKSSHEDYFAVEYGKGSGYYDVNKKMDSEDTALCVGAVVTNMFHWWVDQNRENIEKFKKQDPENNGVMKFEGVKEATVDELNHFYKEYQSNKYADQSRFFDLIKKHFGNKALNPEELFELYFNGFYYNSSHRYIEDNEPAQNNLFSKVLENNKLLNPERSYGIDGFSNNVINALKSHKVLGLVYTTPLRYRHIISMWGADIDQDGKVKAIYVTDSDDREITFNDNSKRRIGMIRYDVLVDDNGNIRFTGKGATHKEEGAIYAGLYSLSRGDEVWEDYFKKYPEVQENL

SEQ ID NO: 152 - protein, 319 aa, synthetic construct
  VARIANT 1: note = M or absent or a signal peptide linked via a peptide bond
XTALGRRKAEDRIKETLWADGVKIDEKDFEHIKSSHEDYFAVEYGKGSGYYDVNKKMDSEDTALCVGAVVTNMFHWWVDQNRENIEKFKKQDPENNGVMKFEGVKEATVDELNHFYKEYQSNKYADQSRFFDLIKKHFGNKALNPEELFELYFNGFYYNSSHRYIEDNEPAQNNLFSKVLENNKLLNPERSYGIDGFSNNVINALKSHKVLGLVYTTPLTYRHIISMWGADIDQDGKVKAIYVTDSDDREITFNDNSKRRIGMIRYDVLVDDNGNIRFTGKGATHKEEGAIYAGLYSLSRGDEVWEDYFKKYPEVQENL

SEQ ID NO: 153 - protein, 319 aa, synthetic construct
  VARIANT 1: note = M or absent or a signal peptide linked via a peptide bond
XTALGRRKAEDRIKETLWADGVKIDEKDFEHIKSSHEDYFAVEYGKGSGYYDVNKKMDSEDTALCVGAVVTNMFHWWVDQNRENIEKFKKQDPENNGVMKFEGVKEATVDELNHFYKEYQSNKYADQSRFFDLIKSHFGNKALNPEELFELYFNGFYYNSSQRYIEDNEPAQNNLFSKVLENNKLLNPERSYGIDGFSNNVINALKSHKVLGLVHTTPLTYRHIISMWGADIDQDGKVKAIYVTDSDDREITFNDNSSRRIGMIRYDVLVDDNGNIRFTGKGATHKEEGAIYAGLYSLSRGDEVWEDYFKKYPEVQENL

SEQ ID NO: 154 - protein, 319 aa, synthetic construct
  VARIANT 1: note = M or absent or a signal peptide linked via a peptide bond
XTALGRRKAEDRIKETLWADGVKIDEKDFEHIKSSHEDYFAVEYGKGSGYYDVNKKMDSEDTALCVGAVVTNMFHWWVDQNRENIEKFKKQDPENNGVMKFEGVKEATVDELNHFYKEYQSNKYADQSRFFDLIKSHFGNKALNPEELFELYFNGFYYNSSQRYIEDNEPAQNNLFSKVLENNKLLNPERSYGIDGFSNNVINALKSHKVLGLVHTTPLTYRHIISMWGADIDQDGKVKAIYVTDSDDREITFNDNSKRWIGMIRYDVLVDDNGNIRFTGKGATHKEEGAIYAGLYSLSRGDEVWEDYFKKYPEVQENL

SEQ ID NO: 155 - protein, 319 aa, synthetic construct
  VARIANT 1: note = M or absent or a signal peptide linked via a peptide bond
XTALGRRKAEDRIKETLWADGVKIDEKDFEHIKSSHEDYFAVEYGKGSGYYDVNKKMDSEDSALCVGAVVTNMFHWWVDQNRENIEKFKKQDPENNGVMKFEGVKEATVDELNHFYKEYQSNKYADQSRFFDLIKSHFGNKALNPEELFELYFNGFYYNSSQRYIEDNEPAQNNLFSKVLENNKLLNPERSYGIDGFSNNVINALKSHKVLGLVHTTPLTYRHIISMWGADIDQDGKVKAIYVTDSDDREITFNDNSKRRIGMIRYDVLVDDNGNIRFTGKGATHKEEGAIYAGLYSLSRGDEVWEDYFKKYPEVQENL

SEQ ID NO: 156 - protein, 319 aa, synthetic construct
  VARIANT 1: note = M or absent or a signal peptide linked via a peptide bond
XTALGRRKAEDRIKETLWADGVKIDEKDFEHIKSSHEDYFAVEYGKGSGYYDVNKKMDSEDTALCVGAVVTNMFHWWVDQNRENIEKFKKQDPENNGVMKFEGVKEATVDELNHFYKEYQSNKYADQSRFFDLIKSHFGNKALNPEELFELYFNGFYYNSSQRYIEDNEPAQNNLFSKVLENNKLLNPERSYGIDGFSNNVINALKSHKVLGLVYTTPLTYRHIISMWGADIDQDGKVKAIYVTDSDDREITFNDNSKRRIGMIRYDVLVDDNGNIRFTGKGATHKEEGAIYAGLYSLSRGDEVWEDYFKKYPEVQENL

SEQ ID NO: 157 - protein, 319 aa, synthetic construct
  VARIANT 1: note = M or absent or a signal peptide linked via a peptide bond
XTALGRRWAEQRIKYTLWADGVKIDEKHFEHIKSSHEDYFAVEYGKGSGYYDVNKKMDSEDTALCVGAVVTNMFHWWVDQNRENIEKFKKQDPENNGVMKFEGVKEATVDELNHFYKEYQSNKYADQSRFFDLIKSHFGNKALNPEELFELYFNGFYYNSSQRYIEDNEPAQNNLFSKVLENNKLLNPERSYGIDGFSNNVINALKSHKVLGLVHTTPLTYRHIISMWGADIDQDGKVKAIYVTDSDDREITFNDNSKRRIGMIRYDVLVDDNGNIRFTGKGATHKEEGAIYAGLYSLSRGDEVWEDYFKKYPEVQENL

SEQ ID NO: 158 - protein, 319 aa, synthetic construct
  VARIANT 1: note = M or absent or a signal peptide linked via a peptide bond
XTALGRRWAEQRIKYTLWADGVKIDEKHFEHIKSSHEDYFAVEYGKGSGYYDVNKKMDSEDSALCVGAVVTNMFHWWVDQNRENIEKFKKQDPENNGVMKFEGVKEATVDELNHFYKEYQSNKYADQSRFFDLIKSHFGNKALNPEELFELYFNGFYYNSSQRYIEDNEPAQNNLFSKVLENNKLLNPERSYGIDGFSNNVINALKSHKVLGLVHTTPLTYRHIISMWGADIDQDGKVKAIYVTDSDDREITFNDNSSRWIGMIRYDVLVDDNGNIRFTGKGATHKEEGAIYAGLYSLSRGDEVWEDYFKKYPEVQENL

SEQ ID NO: 159 - protein, 319 aa, synthetic construct
  VARIANT 1: note = M or absent or a signal peptide linked via a peptide bond
XTALGRRKAEQRIKETLWADGVKIDEKDFEHIKSSHEDYFAVEYGKGSGYYDVNKKMDSEDTALCVGAVVTNMFHWWVDQNRENIEKFKKQDPENNGVMKFNGVKEATVDELNHFYKEYQSNKYADQSRFFDLIKKHFGNKALNPEELFELYFNGFYYNSSHRYIEDNKPAQNNLFSKVLENNKLLNPERSYGIDGFSNNVINALKSHKVLGLVHTTPLRYRHIISMWGADIDQDGKVKAIYVTDSDDREITFNDNSKRRIGMIRYDVLVDDNGNIRFTGKGATHKEEGAIYAGLYSLSRGDEVWEDYFKKYPEVQENL

SEQ ID NO: 160 - protein, 319 aa, synthetic construct
  VARIANT 1: note = M or absent or a signal peptide linked via a peptide bond
XTALGRRKAEDRIKETLWADGVKIDEKDFEHIKSSHEDYFAVEYGKGSGYYQVNKKMDSEDTALCVGAVVTNMFHWWVDQNRENIEKFKKQDPENNGVMKFNGVKEATVDELNHFYKEYQSNKYADQSRFFDLIKKHFGNKALNPEELFELYFNGFYYNSSHRYIEDNKPAQNNLFSKVLENNKLLNPERSYGIDGFSNNVINALKSHKVLGLVHTTPLRYRHIISMWGADIDQDGKVKAIYVTDSDDREITFNDNSKRRIGMIRYDVLVDDNGNIRFTGKGATHKEEGAIYAGLYSLSRGDEVWEDYFKKYPEVQENL

SEQ ID NO: 161 - protein, 319 aa, synthetic construct
  VARIANT 1: note = M or absent or a signal peptide linked via a peptide bond
XTALGRRKAEDRIKETLWADGVKIDEKDFEHIKSSHEDYFAVEYGKGSGYYDVNKKMDSEDTALCVGAVVTNMFHWWVDQNRENIEKFKKQDPENNGVMKFNGVKEATVDELNHFYKEYQSNKYADQSRFFDLIKKHFGNKALNPEELFELYFNGFYYNSSHRYIEDNKPAQNNLFSKVLENNKLLNPERSYGIDGFSNNVINALKSHKVLGLVHTTPLRYRHIISMWGADIDQDGKVKAIYVTDSDDREITFNDNSKRRIGMIRYYVLVDDNGNIRFTGKGATHKEEGAIYAGLYSLSRGDEVWEDYFKKYPEVQENL

SEQ ID NO: 162 - protein, 319 aa, synthetic construct
  VARIANT 1: note = M or absent or a signal peptide linked via a peptide bond
XTALGRRWAEDRIKETLWADGVKIDEKDFEHIKSSHEDYFAVEYGKGSGYYDVNKKMDSEDTALCVGAVVTNMFHWWVDQNRENIEKFKKQDPENNGVMKFNGVKEATVDELNHFYKEYQSNKYADQSRFFDLIKKHFGNKALNPEELFELYFNGFYYNSSHRYIEDNKPAQNNLFSKVLENNKLLNPERSYGIDGFSNNVINALKSHKVLGLVHTTPLRYRHIISMWGADIDQDGKVKAIYVTDSDDREITFNDNSKRRIGMIRYDVLVDDNGNIRFTGKGATHKEEGAIYAGLYSLSRGDEVWEDYFKKYPEVQENL

SEQ ID NO: 163 - protein, 319 aa, synthetic construct
  VARIANT 1: note = M or absent or a signal peptide linked via a peptide bond
XTALGRRKAEDRIKYTLWADGVKIDEKDFEHIKSSHEDYFAVEYGKGSGYYDVNKKMDSEDTALCVGAVVTNMFHWWVDQNRENIEKFKKQDPENNGVMKFNGVKEATVDELNHFYKEYQSNKYADQSRFFDLIKKHFGNKALNPEELFELYFNGFYYNSSHRYIEDNKPAQNNLFSKVLENNKLLNPERSYGIDGFSNNVINALKSHKVLGLVHTTPLRYRHIISMWGADIDQDGKVKAIYVTDSDDREITFNDNSKRRIGMIRYDVLVDDNGNIRFTGKGATHKEEGAIYAGLYSLSRGDEVWEDYFKKYPEVQENL

SEQ ID NO: 164 - protein, 319 aa, synthetic construct
  VARIANT 1: note = M or absent or a signal peptide linked via a peptide bond
XTALGRRKAEDRIKETLWADGVKIDEKHFEHIKSSHEDYFAVEYGKGSGYYDVNKKMDSEDTALCVGAVVTNMFHWWVDQNRENIEKFKKQDPENNGVMKFNGVKEATVDELNHFYKEYQSNKYADQSRFFDLIKKHFGNKALNPEELFELYFNGFYYNSSHRYIEDNKPAQNNLFSKVLENNKLLNPERSYGIDGFSNNVINALKSHKVLGLVHTTPLRYRHIISMWGADIDQDGKVKAIYVTDSDDREITFNDNSKRRIGMIRYDVLVDDNGNIRFTGKGATHKEEGAIYAGLYSLSRGDEVWEDYFKKYPEVQENL

SEQ ID NO: 165 - protein, 319 aa, synthetic construct
  VARIANT 1: note = M or absent or a signal peptide linked via a peptide bond
XTALGRRKAEDRIKETLWADGVKIDEKDFEHIKSSHEDYFAVEYGKGSGYYDVNKKMDSEDTALCVGAVVTNMFHWWVDQNRENIEKFKKQDPENNGVMKFNGVKEATVDELNHFYKEYQSNKYADQSRFFDLIKKHFGNKALNPEELFELYFNGFYYQSSHRYIEDNKPAQNNLFSKVLENNKLLNPERSYGIDGFSNNVINALKSHKVLGLVHTTPLRYRHIISMWGADIDQDGKVKAIYVTDSDDREITFNDNSKRRIGMIRYDVLVDDNGNIRFTGKGATHKEEGAIYAGLYSLSRGDEVWEDYFKKYPEVQENL

SEQ ID NO: 166 - protein, 319 aa, synthetic construct
  VARIANT 1: note = M or absent or a signal peptide linked via a peptide bond
XTALGRRKAEDRIKETLWADGVKIDEKDFEHIKSSHEDYFAVEYGKGSGYYDVNKKMDSEDTALCVGAVVTNMFHWWVDQNRENIEKFKKQDPENNGVMKFNGVKEATVDELNHFYKEYQSNKYADQSRFFDLIKKHFGNKALNPEELFELYFNGFYYNSNHRYIEDNKPAQNNLFSKVLENNKLLNPERSYGIDGFSNNVINALKSHKVLGLVHTTPLRYRHIISMWGADIDQDGKVKAIYVTDSDDREITFNDNSKRRIGMIRYDVLVDDNGNIRFTGKGATHKEEGAIYAGLYSLSRGDEVWEDYFKKYPEVQENL

SEQ ID NO: 167 - protein, 319 aa, synthetic construct
  VARIANT 1: note = M or absent or a signal peptide linked via a peptide bond
XTALGRRKAEDRIKETLWADGVKIDEKDFEHIKSSHEDYFAVEYGKGSGYYDVNKKMDSEDTALCVGAVVTNMFHWWVDQNRENIEKFKKQDPENNGVMKFNGVKEATVDELNHFYKEYQSNKYADQSRFFDLIKKHFGNKALNPEELFELYFNGFYYGSSHRYIEDNKPAQNNLFSKVLENNKLLNPERSYGIDGFSNNVINALKSHKVLGLVHTTPLRYRHIISMWGADIDQDGKVKAIYVTDSDDREITFNDNSKRRIGMIRYDVLVDDNGNIRFTGKGATHKEEGAIYAGLYSLSRGDEVWEDYFKKYPEVQENL

SEQ ID NO: 168 - protein, 319 aa, synthetic construct
  VARIANT 1: note = M or absent or a signal peptide linked via a peptide bond
XTALGRRKAEDRIKETLWADGVKIDEKDFEHIKSSHEDYFAVEYGKGSGYYDVNKKMDSEDTALCVGAVVTNMFHWWVDQNRENIEKFKKQDPENNGVMKFNGVKEATVDELNHFYKEYQSNKYADQSRFFDLIKKHFGNKALNPEELFELYFNGFYYTSSHRYIEDNKPAQNNLFSKVLENNKLLNPERSYGIDGFSNNVINALKSHKVLGLVHTTPLRYRHIISMWGADIDQDGKVKAIYVTDSDDREITFNDNSKRRIGMIRYDVLVDDNGNIRFTGKGATHKEEGAIYAGLYSLSRGDEVWEDYFKKYPEVQENL

SEQ ID NO: 169 - protein, 319 aa, synthetic construct
  VARIANT 1: note = M or absent or a signal peptide linked via a peptide bond
XTALGRRKAEDRIKETLWADGVKIDEKDFEHIKSSHEDYFAVEYGKGSGYYDVNKKMDSEDTALCVGAVVTNMFHWWVDQNRENIEKFKKQDPENNGVMKFNGVKEATVDELNHFYKEYQSNKYADQSRFFDLIKKHFGNKALNPEELFELYFNGFYYNSSHRYIEDNKPAQNNLFSKVLENNKLLNPERSYGIDGFSNNVINALKSHKVLGLVHTTPLRYRHIISMWGADIDQDGKVKAIYVTDSDDREITFNDSSSRRIGMIRYDVLVDDNGNIRFTGKGATHKEEGAIYAGLYSLSRGDEVWEDYFKKYPEVQENL

SEQ ID NO: 170 - protein, 319 aa, synthetic construct
  VARIANT 1: note = M or absent or a signal peptide linked via a peptide bond
XTALGRRKAEDRIKETLWADGVKIDEKDFEHIKSSHEDYFAVEYGKGSGYYDVNKKMDSEDTALCVGAVVTNMFHWWVDQNRENIEKFKKQDPENNGVMKFNGVKEATVDELNHFYKEYQSNKYADQSRFFDLIKKHFGNKALNPEELFELYFNGFYYNSSHRYIEDNKPAQNNLFSKVLENNKLLNPERSYGIDGFSNNVINALKSHKVLGLVHTTPLRYRHIISMWGADIDQDGKVKAIYVTDSDDREITFNDQSSRRIGMIRYDVLVDDNGNIRFTGKGATHKEEGAIYAGLYSLSRGDEVWEDYFKKYPEVQENL

SEQ ID NO: 171 - protein, 321 aa, synthetic construct
  VARIANT 1: note = M or absent or a signal peptide linked via a peptide bond
XTALGRRKAEDRIKETLWADGVKIDEKDFEHIKSSRTHEDYFAVEYGKGSGYYDVNKKMDSEDTALCVGAVVTNMFHWWVDQNRENIEKFKKQDPENNGVMKFNGVKEATVDELNHFYKEYQSNKYADQSRFFDLIKKHFGNKALNPEELFELYFNGFYYNSSHRYIEDNKPAQNNLFSKVLENNKLLNPERSYGIDGFSNNVINALKSHKVLGLVHTTPLRYRHIISMWGADIDQDGKVKAIYVTDSDDREITFNDNSKRRIGMIRYDVLVDDNGNIRFTGKGATHKEEGAIYAGLYSLSRGDEVWEDYFKKYPEVQENL

SEQ ID NO: 172 - protein, 321 aa, synthetic construct
  VARIANT 1: note = M or absent or a signal peptide linked via a peptide bond
XTALGRRKAEDRIKETLWADGVKIDEKDFEHIKDDRTKSDYFAVEYGKGSGYYDVNKKMDSEDTALCVGAVVTNMFHWWVDQNRENIEKFKKQDPENNGVMKFNGVKEATVDELNHFYKEYQSNKYADQSRFFDLIKKHFGNKALNPEELFELYFNGFYYNSSHRYIEDNKPAQNNLFSKVLENNKLLNPERSYGIDGFSNNVINALKSHKVLGLVHTTPLRYRHIISMWGADIDQDGKVKAIYVTDSDDREITFNDNSKRRIGMIRYDVLVDDNGNIRFTGKGATHKEEGAIYAGLYSLSRGDEVWEDYFKKYPEVQENL

SEQ ID NO: 173 - protein, 321 aa, synthetic construct
  VARIANT 1: note = M or absent or a signal peptide linked via a peptide bond
XTALGRRKAEDRIKETLWADGVKIDEKDFEHIKDDRTHEDYFAVEYGKGSGYYDVNKKMDSEDTALCVGAVVTNMFHWWVDQNRENIEKFKKQDPENNGVMKFNGVKEATVDELNHFYKEYQSNKYADQSRFFDLIKKHFGNKALNPEELFELYFNGFYYNSSHRYIEDNKPAQNNLFSKVLENNKLLNPERSYGIDGFSNNVINALKSHKVLGLVHTTPLRYRHIISMWGADIDQDGKVKAIYVTDSDDREITFNDNSKRRIGMIRYDVLVDDNGNIRFTGKGATHKEEGAIYAGLYSLSRGDEVWEDYFKKYPEVQENL

SEQ ID NO: 174 - protein, 321 aa, synthetic construct
  VARIANT 1: note = M or absent or a signal peptide linked via a peptide bond
XTALGRRKAEDRIKETLWADGVKIDEKDFEHIKSSRTKSDYFAVEYGKGSGYYDVNKKMDSEDTALCVGAVVTNMFHWWVDQNRENIEKFKKQDPENNGVMKFNGVKEATVDELNHFYKEYQSNKYADQSRFFDLIKKHFGNKALNPEELFELYFNGFYYNSSHRYIEDNKPAQNNLFSKVLENNKLLNPERSYGIDGFSNNVINALKSHKVLGLVHTTPLRYRHIISMWGADIDQDGKVKAIYVTDSDDREITFNDNSKRRIGMIRYDVLVDDNGNIRFTGKGATHKEEGAIYAGLYSLSRGDEVWEDYFKKYPEVQENL

SEQ ID NO: 175 - protein, 318 aa, synthetic construct
  VARIANT 1: note = M or absent or a signal peptide linked via a peptide bond
XTALGRRKAEDRIKETLWADGVKIDEKDFEHIKSSHEDYFAVEYGKGSGYYDVNKKMDSEDTALCVGAVVTNMFHWWVDQNRENIEKFKKQDPENNGVMKFNGVKEATVDELNHFYRDNRDNYADQSRFFDLIKKHFGNKALNPEELFELYFNGFYYNSSHRYIEDNKPAQNNLFSKVLENNKLLNPERSYGIDGFSNNVINALKSHKVLGLVHTTPLRYRHIISMWGADIDQDGKVKAIYVTDSDDREITFNDNSKRRIGMIRYDVLVDDNGNIRFTGKGATHKEEGAIYAGLYSLSRGDEVWEDYFKKYPEVQENL

SEQ ID NO: 176 - protein, 321 aa, synthetic construct
  VARIANT 1: note = M or absent or a signal peptide linked via a peptide bond
XTALGRRKAEDRIKETLWADGVKIDEKDFEHIKSSHEDYFAVEYGKGSGYYDVNKKMDSEDTALCVGAVVTNMFHWWVDQNRENIEKFKKQDPENNGVMKFNGVKEATVDELNHFYHSNDNGDVTYADQSRFFDLIKKHFGNKALNPEELFELYFNGFYYNSSHRYIEDNKPAQNNLFSKVLENNKLLNPERSYGIDGFSNNVINALKSHKVLGLVHTTPLRYRHIISMWGADIDQDGKVKAIYVTDSDDREITFNDNSKRRIGMIRYDVLVDDNGNIRFTGKGATHKEEGAIYAGLYSLSRGDEVWEDYFKKYPEVQENL

SEQ ID NO: 177 - protein, 321 aa, synthetic construct
  VARIANT 1: note = M or absent or a signal peptide linked via a peptide bond
XTALGRRKAEDRIKETLWADGVKIDEKDFEHIKSSHEDYFAVEYGKGSGYYDVNKKMDSEDTALCVGAVVTNMFHWWVDQNRENIEKFKKQDPENNGVMKFNGVKEATVDELNHFYKEYDNGDVTYADQSRFFDLIKKHFGNKALNPEELFELYFNGFYYNSSHRYIEDNKPAQNNLFSKVLENNKLLNPERSYGIDGFSNNVINALKSHKVLGLVHTTPLRYRHIISMWGADIDQDGKVKAIYVTDSDDREITFNDNSKRRIGMIRYDVLVDDNGNIRFTGKGATHKEEGAIYAGLYSLSRGDEVWEDYFKKYPEVQENL

SEQ ID NO: 178 - protein, 320 aa, synthetic construct
  VARIANT 1: note = M or absent or a signal peptide linked via a peptide bond
XTALGRRKAEDRIKETLWADGVKIDEKDFEHIKSSHEDYFAVEYGKGSGYYDVNKKMDSEDTALCVGAVVTNMFHWWVDQNRENIEKFKKQDPENNGVMKFNGVKEATVDELNHFYASPYEEGGYADQSRFFDLIKKHFGNKALNPEELFELYFNGFYYNSSHRYIEDNKPAQNNLFSKVLENNKLLNPERSYGIDGFSNNVINALKSHKVLGLVHTTPLRYRHIISMWGADIDQDGKVKAIYVTDSDDREITFNDNSKRRIGMIRYDVLVDDNGNIRFTGKGATHKEEGAIYAGLYSLSRGDEVWEDYFKKYPEVQENL

SEQ ID NO: 179 - protein, 324 aa, synthetic construct
  VARIANT 1: note = M or absent or a signal peptide linked via a peptide bond
XTALGRRKAEDRIKETLWADGVKIDEKDFEHIKSSHEDYFAVEYGKGSGYYDVNKKMDSEDTALCVGAVVTNMFHWWVDQNRENIEKFKKQDPENNGVMKFNGVKEATVDELNHFYKEYQSNKYADQSRFFDLIKKHFGNKALNPEELFELYFNGFYYNSSHRYINWSERTLETPAQNNLFSKVLENNKLLNPERSYGIDGFSNNVINALKSHKVLGLVHTTPLRYRHIISMWGADIDQDGKVKAIYVTDSDDREITFNDNSKRRIGMIRYDVLVDDNGNIRFTGKGATHKEEGAIYAGLYSLSRGDEVWEDYFKKYPEVQENL

SEQ ID NO: 180 - protein, 324 aa, synthetic construct
  VARIANT 1: note = M or absent or a signal peptide linked via a peptide bond
XTALGRRKAEDRIKETLWADGVKIDEKDFEHIKSSHEDYFAVEYGKGSGYYDVNKKMDSEDTALCVGAVVTNMFHWWVDQNRENIEKFKKQDPENNGVMKFNGVKEATVDELNHFYKEYQSNKYADQSRFFDLIKKHFGNKALNPEELFELYFNGFYYNSSHRYIKEKNEKLDNPAQNNLFSKVLENNKLLNPERSYGIDGFSNNVINALKSHKVLGLVHTTPLRYRHIISMWGADIDQDGKVKAIYVTDSDDREITFNDNSKRRIGMIRYDVLVDDNGNIRFTGKGATHKEEGAIYAGLYSLSRGDEVWEDYFKKYPEVQENL

SEQ ID NO: 181 - protein, 323 aa, synthetic construct
  VARIANT 1: note = M or absent or a signal peptide linked via a peptide bond
XTALGRRKAEDRIKETLWADGVKIDEKDFEHIKSSHEDYFAVEYGKGSGYYDVNKKMDSEDTALCVGAVVTNMFHWWVDQNRENIEKFKKQDPENNGVMKFNGVKEATVDELNHFYKEYQSNKYADQSRFFDLIKKHFGNKALNPEELFELYFNGFYYNSSHRYIEDNKPAQNNLFSKVLENNKLLNPERFKKGSYGIDGFSNNVINALKSHKVLGLVHTTPLRYRHIISMWGADIDQDGKVKAIYVTDSDDREITFNDNSKRRIGMIRYDVLVDDNGNIRFTGKGATHKEEGAIYAGLYSLSRGDEVWEDYFKKYPEVQENL

SEQ ID NO: 182 - protein, 321 aa, synthetic construct
  VARIANT 1: note = M or absent or a signal peptide linked via a peptide bond
XTALGRRKAEDRIKETLWADGVKIDEKDFEHIKSSHEDYFAVEYGKGSGYYDVNKKMDSEDTALCVGAVVTNMFHWWVDQNRENIEKFKKQDPENNGVMKFNGVKEATVDELNHFYKEYQSNKYADQSRFFDLIKKHFGNKALNPEELFELYFNGFYYNSSHRYIEDNKPAQNNLFSKVLENNKLLNPERSYGIDGFSNNVINALKSHKVLGLVHTTPLRHSLGHIISMWGADIDQDGKVKAIYVTDSDDREITFNDNSKRRIGMIRYDVLVDDNGNIRFTGKGATHKEEGAIYAGLYSLSRGDEVWEDYFKKYPEVQENL

SEQ ID NO: 183 - protein, 321 aa, synthetic construct
  VARIANT 1: note = M or absent or a signal peptide linked via a peptide bond
XTALGRRKAEDRIKETLWADGVKIDEKDFEHIKSSHEDYFAVEYGKGSGYYDVNKKMDSEDTALCVGAVVTNMFHWWVDQNRENIEKFKKQDPENNGVMKFNGVKEATVDELNHFYKEYQSNKYADQSRFFDLIKKHFGNKALNPEELFELYFNGFYYNSSHRYIEDNKPAQNNLFSKVLENNKLLNPERSYGIDGFSNNVINALKSHKVLGLVHTTPLRRSLGHIISMWGADIDQDGKVKAIYVTDSDDREITFNDNSKRRIGMIRYDVLVDDNGNIRFTGKGATHKEEGAIYAGLYSLSRGDEVWEDYFKKYPEVQENL

SEQ ID NO: 184 - protein, 325 aa, synthetic construct
  VARIANT 1: note = M or absent or a signal peptide linked via a peptide bond
XTALGRRKAEDRIKETLWADGVKIDEKDFEHIKSSHEDYFAVEYGKGSGYYDVNKKMDSEDTALCVGAVVTNMFHWWVDQNRENIEKFKKQDPENNGVMKFNGVKEATVDELNHFYKEYQSNKYADQSRFFDLIKKHFGNKALNPEELFELYFNGFYYNSSHRYIEDNKPAQNNLFSKVLENNKLLNPERSYGIDGFSNNVINALKSHKVLGLVHTTPLRYRHIISMWGADIDQDGKVKAIYVTDSDDREITFNDNSKRRIGMIRYDVLVDDNGNIRFTGKGADNTDGEAKKEEGAIYAGLYSLSRGDEVWEDYFKKYPEVQENL

SEQ ID NO: 185 - protein, 319 aa, synthetic construct
  VARIANT 1: note = M or absent or a signal peptide linked via a peptide bond
XTALGRRKAEDRIKETLWADGVKIDEKDFEHIKSSHEDYFAVEYGKGSGYYDVNKKMDSEDTALCVGAVVTNMFHWWVDQNRENIEKFKKQDPENNGVMKFNGVKEATVDELNHFYKEYQSNKYADQSRFFDLIKKHFGNKALNPEELFELYFNGFYYNSEHRYIEDNKPAQNNLFSKVLENNKLLNPERSYGIDGFSNNVINALKSHKVLGLVHTTPLRYRHIISMWGADIDQDGKVKAIYVTDSDDREITFNDNSKRRIGMIRYDVLVDDNGNIRFTGKGATHKEEGAIYAGLYSLSRGDEVWEDYFKKYPEVQENL

SEQ ID NO: 186 - protein, 319 aa, synthetic construct
  VARIANT 1: note = M or absent or a signal peptide linked via a peptide bond
XTALGRRKAEDRIKETLWADGVKIDEKDFEHIKSSHEDYFAVEYGKGSGYYDVNKKMDSEDTALCVGAVVTNMFHWWVDQNRENIEKFKKQDPENNGVMKFNGVKEATVDELNHFYKEYQSNKYADQSRFFDLIKKHFGNKALNPEELFELYFNGFYYKSSHRYIEDNKPAQNNLFSKVLENNKLLNPERSYGIDGFSNNVINALKSHKVLGLVHTTPLRYRHIISMWGADIDQDGKVKAIYVTDSDDREITFNDNSKRRIGMIRYDVLVDDNGNIRFTGKGATHKEEGAIYAGLYSLSRGDEVWEDYFKKYPEVQENL

SEQ ID NO: 187 - protein, 319 aa, synthetic construct
  VARIANT 1: note = M or absent or a signal peptide linked via a peptide bond
XTALGRRKAEDRIKETLWADGVKIDEKDFEHIKSSHEDYFAVEYGKGSGYYDVNKKMDSEDTALCVGAVVTNMFHWWVDQNRENIEKFKKQDPENNGVMKFNGVKEATVDELNHFYKEYQSNKYADQSRFFDLIKKHFGNKALNPEELFELYFNGFYYNSSHRYIEDNKPAQNNLFSKVLENNKLLNPERSRGIDGFSNNVINALKSHKVLGLVHTTPLRYRHIISMWGADIDQDGKVKAIYVTDSDDREITFNDNSKRRIGMIRYDVLVDDNGNIRFTGKGATHKEEGAIYAGLYSLSRGDEVWEDYFKKYPEVQENL

SEQ ID NO: 188 - protein, 321 aa, synthetic construct
  VARIANT 1: note = M or absent or a signal peptide linked via a peptide bond
XTALGRRKAEDRIKETLWADGVKIDEKDFEHIKSSHEDYFAVEYGKGSGYYDVNKKMDSEDTALCVGAVVTNMFHWWVDQNRENIEKFKKQDPENNGVMKFNGVKEATVDELNHFYKEYQSNKYADQSRFFDLIKKHFGNKALNPEELFELYFNGFYYNSSHRYIEDNKPAQNNLFSKVLENNKLLNPEGYGIYGIDGFSNNVINALKSHKVLGLVHTTPLRYRHIISMWGADIDQDGKVKAIYVTDSDDREITFNDNSKRRIGMIRYDVLVDDNGNIRFTGKGATHKEEGAIYAGLYSLSRGDEVWEDYFKKYPEVQENL

SEQ ID NO: 189 - protein, 323 aa, synthetic construct
  VARIANT 1: note = M or absent or a signal peptide linked via a peptide bond
XTALGRRKAEDRIKETLWADGVKIDEKDFEHIKSSHEDYFAVEYGKGSGYYDVNKKMDSEDTALCVGAVVTNMFHWWVDQNRENIEKFKKQDPENNGVMKFNGVKEATVDELNHFYKEYQSNKYADQSRFFDLIKKHFGNKALNPEELFELYFNGFYYNSSHRYIEDNKPAQNNLFSKVLENNKLLNPEGGYGGIYGIDGFSNNVINALKSHKVLGLVHTTPLRYRHIISMWGADIDQDGKVKAIYVTDSDDREITFNDNSKRRIGMIRYDVLVDDNGNIRFTGKGATHKEEGAIYAGLYSLSRGDEVWEDYFKKYPEVQENL

SEQ ID NO: 190 - protein, 319 aa, synthetic construct
  VARIANT 1: note = M or absent or a signal peptide linked via a peptide bond
XTALGRRKAEDRIKETLWADGVKIDEKDFEHIKSSHEDYFAVEYGKGSGYYDVNKKMDSEDTALCVGAVVTNMFHWWVDQNRENIEKFKKQDPENNGVMKFNGVKEATVDELNHFYKEYQSNKYADQSRFFDLIKKHFGNKALNLTELFELYFNGFYYNSSHRYIEDNKPAQNNLFSKVLENNKLLNPERSYGIDGFSNNVINALKSHKVLGLVHTTPLRYRHIISMWGADIDQDGKVKAIYVTDSDDREITFNDNSKRRIGMIRYDVLVDDNGNIRFTGKGATHKEEGAIYAGLYSLSRGDEVWEDYFKKYPEVQENL

SEQ ID NO: 191 - protein, 319 aa, synthetic construct
  VARIANT 1: note = M or absent or a signal peptide linked via a peptide bond
XTALGRRKAEDRIKETLWADGVKIDEKDFEHIKSSHEDYFAVEYGKGSGYYDVNKKMDSEDTALCVGAVVTNMFHWWVDQNRENIEKFKKQDPENNGVMKFNGVKEATVDELNHFYKEYQSNKYADQSRFFDLIKKHFGNKALNFTELFELYFNGFYYNSSHRYIEDNKPAQNNLFSKVLENNKLLNPERSYGIDGFSNNVINALKSHKVLGLVHTTPLRYRHIISMWGADIDQDGKVKAIYVTDSDDREITFNDNSKRRIGMIRYDVLVDDNGNIRFTGKGATHKEEGAIYAGLYSLSRGDEVWEDYFKKYPEVQENL

SEQ ID NO: 192 - protein, 320 aa, synthetic construct
  VARIANT 1: note = M or absent or a signal peptide linked via a peptide bond
XTALGRRKAEDRIKETLWADGVKIDEKDFEHIKSSHEDYFAVEYGKGSGYYDVNKKMDSEDTALCVGAVVTNMFHWWVDQNRENIEKFKKQDPENNGVMKFNGVKEATVDELNHFYKEYQSNKYADQSRFFDLIKKHFGNKALNLGTELFELYFNGFYYNSSHRYIEDNKPAQNNLFSKVLENNKLLNPERSYGIDGFSNNVINALKSHKVLGLVHTTPLRYRHIISMWGADIDQDGKVKAIYVTDSDDREITFNDNSKRRIGMIRYDVLVDDNGNIRFTGKGATHKEEGAIYAGLYSLSRGDEVWEDYFKKYPEVQENL

SEQ ID NO: 193 - protein, 320 aa, synthetic construct
  VARIANT 1: note = M or absent or a signal peptide linked via a peptide bond
XTALGRRKAEDRIKETLWADGVKIDEKDFEHIKSSHEDYFAVEYGKGSGYYDVNKKMDSEDTALCVGAVVTNMFHWWVDQNRENIEKFKKQDPENNGVMKFNGVKEATVDELNHFYKEYQSNKYADQSRFFDLIKKHFGNKALNFGTELFELYFNGFYYNSSHRYIEDNKPAQNNLFSKVLENNKLLNPERSYGIDGFSNNVINALKSHKVLGLVHTTPLRYRHIISMWGADIDQDGKVKAIYVTDSDDREITFNDNSKRRIGMIRYDVLVDDNGNIRFTGKGATHKEEGAIYAGLYSLSRGDEVWEDYFKKYPEVQENL

SEQ ID NO: 194 - protein, 322 aa, synthetic construct
  VARIANT 1: note = M or absent or a signal peptide linked via a peptide bond
XTALGRRKAEDRIKETLWADGVKIDEKDFEHIKSSHEDYFAVEYGKGSGYYDVNKKMDSEDTALCVGAVVTNMFHWWVDQNRENIEKFKKQDPENNGVMKFNGVKEATVDELNHFYKEYQSNKYADQSRFFDLIKKHFGNKALNFGTELFELYFNGFYYNSSHRYIEDNKPAQNNLFSKVLENNKLLNPEGYGIYGIDGFSNNVINALKSHKVLGLVHTTPLRYRHIISMWGADIDQDGKVKAIYVTDSDDREITFNDNSKRRIGMIRYDVLVDDNGNIRFTGKGATHKEEGAIYAGLYSLSRGDEVWEDYFKKYPEVQENL

SEQ ID NO: 195 - protein, 319 aa, synthetic construct
  VARIANT 1: note = M or absent or a signal peptide linked via a peptide bond
XTALGRRKAEDRIKETLWADGVKIDEKDFEHIKSSHEDYFAVEYGKGSGYYDVNKKMDSEDTALCVGAVVTNMFHWWVDQNRENIEKFLKQDPENNGVMKFNGVKEATVDELNHFYKEYQSNKYADQSRFFDLIKKHFGNKALNPEELFELYFNGFYYNSSHRYIEDNKPAQNNLFSKVLENNKLLNPERSYGIDGFSNNVKNALKSHKVLGLVHGTPLRYRHIISMWGADIDQDGKVKAIYVTDSDDREITFNDNSKRRIGMIRYDVLVDDNGNIRFTGKGATHKEEGAIYAGLYSLSRGDEEWEDYFKKYPEVQENL

SEQ ID NO: 196 - protein, 319 aa, synthetic construct
  VARIANT 1: note = M or absent or a signal peptide linked via a peptide bond
XTALGRRKAEDRIKETLWADGVKIDEKDFEHIKSSHEDYFAVEYGKGSGYYDVNKKMDSEDTALCVGAVVTNMFHWWVDQNRENIEKFLKQDPENNGVMKFNGVKEATVDELNHFYKEYQSNKYADQSRFFDLIKKHFPNKALNPEELFELYFNGFYYNSSHRYIEDNKPAQNNLFSKVLENNKLLNPERSYGIDGFSNNVKNALKSHKVLGLVHGTPLRYRHIISMWGADIDQDGKVKAIYVTDSDDREITFNDNSKRRIGMIRYDVLVDDNGNIRFTGKGATHKEEGAIYAGLYSLSRGDEEWEDYFKKYPEVQENL

SEQ ID NO: 197 - protein, 319 aa, synthetic construct
  VARIANT 1: note = M or absent or a signal peptide linked via a peptide bond
XTALGRRKAEDRIKETLWADGVKIDEKDFEHIKSSHEDYFAVEYGKGSGYYDVNKDMDSEDTALCVGAVVTNMFHWWVDQNRENIEKFLKQDPENNGVMKFNGVKEATVDELNHFYKEYQSDKYADQSRFFDLIKDHFGNKALNPEELFELYFNGFYYNSSHRYIEDNKPAQNNLFSKVLENNKLLNPERSYGIDGFSNNVKNALKSHKVLGLVHGTPLRYRHIISMWGADIDQDGKVKAIYVTDSDDREITFNDNSKRRIGMIRYDVLVDDNGNIRFTGKGATHKEEGAIYAGLYSLSRGDEEWEDYFKKYPEVQENL

SEQ ID NO: 198 - protein, 319 aa, synthetic construct
  VARIANT 1: note = M or absent or a signal peptide linked via a peptide bond
XTALGRRKAEDRIKETLWADGVKIDEKDFEHIKESHEDYFAVEYGKGSGYYDVNKDMDSEDTALCVGAVVTNMFHWWVDQNRENIEKFLKQDPENNGVMKFNGVKEATVDELNHFYKEYQSDKYADQSRFFDLIKDHFGNKALNPEELFELYFNGFYYNSSHRYIEDNKPAQNNLFSKVLENNKLLNPERSYGIDGFSNNVKNALKSHKVLGLVHGTPLRYRHIISMWGADIDQDGKVKAIYVTDSDDREITFNDNSKRRIGMIRYDVLVDDNGNARFTGKGATHKEEGAIYAGLYSLSRGDEEWEDYFKKYPEVQENL

SEQ ID NO: 199 - protein, 319 aa, synthetic construct
  VARIANT 1: note = M or absent or a signal peptide linked via a peptide bond
XTALGRRKAEDRIKETLWADGVKIDEKDFEHIKESHEDYFAVEYGKGSGYYDVNKDMDSEDTALCVGAVVTNMFHWWVDQNRENIEKFLKQDPENNGVMKFNGVKEATVDELNHFYKEYQSDKYADQSRFFDLIKDHFGNKALNPEELFELYFNGFYYNSSHRTIEDNKPAQNNLFSKVLENNKLLNPERSYGIDGFSNNVKNALKSHKVLGLVHGTPLRYRHIISMWGADIDQDGKVKAIYVTDSDDREITFNDNSKRRIGMIRYDVLVDDNGNARFTGKGATHKEEGAIYAGLYSLSRGDEEWEDYFKKYPEVQENL

SEQ ID NO: 200 - protein, 319 aa, synthetic construct
  VARIANT 1: note = M or absent or a signal peptide linked via a peptide bond
XTALGRRKAEDRIKETLWADGVKIDEKDFEHIKESHEDYFAVEYGKGSGYYDVNKDMDSEDTALCVGAVVTNMFHWWVDQNRENIEKFLKQDPENNGVMKFNGVKEATVDELNHFYKEYQSDKYADQSRFFDLIKDHFGNKALNPEELFELYFNGFYYNSSHRTIEDNKPAQNNLFSKVLENNKLLNPERSYGIDGFSNNVKNALKSHKVLGLVHGTPLRTRHIISMWGADIDQDGKVKAIYVTDSDDREITFNDNSKRRIGMIRYDVLVDDNGNARFTGKGATHKEEGAIYAGLYSLSRGDEEWEDYFKKYPEVQENL

SEQ ID NO: 201 - protein, 319 aa, synthetic construct
  VARIANT 1: note = M or absent or a signal peptide linked via a peptide bond
XTALGRRKAEDRIKETLWADGVKIDEKDFEHIKESHEDYFAVEYGKGSGYYDVNKDMDSEDTALCVGAVVTNMFHWWVDQNRENIEKFLKQDPENNGVMKFNGVKEATVDELNEFYKEYQSDKYADQSRFFDLIKDHFGNKALNPEELFELYFNGFYYNSSHRTIEDNKPAQNNLFSKVLENNKLLNPERSYGIDGFSNNVKNALKSHKVLGLVHGTPLRTRHIISMWGADIDQDGKVKAIYVTDSDDREITFNDNSKRRIGMIRYDVLVDDNGNARFTGKGATHKEEGAIYAGLYSLSRGDEEWEDYFKKYPEVQENL

SEQ ID NO: 202 - protein, 319 aa, synthetic construct
  VARIANT 1: note = M or absent or a signal peptide linked via a peptide bond
XTALGRRKAEDRIKETLWADGVKIDEKDFEHIKESHEDYFAVEYGKGSGYYDVNKDMDSEDTALCVGAVVTNMFHWWVDQNRENIEKFLKQDPENNGVMKFNGVKEATVDELNHFYKEYQSDKYADQSRFFDLIKDHFGNKALNPEELFELYFNGFYYNSSHRTIEDNKPAQNNLFSKVLENNKLLNPERSYGIDGFSNNVINALKSHKPLGLVHGTPLRTRHIISMWGADIDQDGKVKAIYVTDSDDREITFNDNSKRRIGMIRYDVLVDDNGNARFTGKGATHKEEGAIYAGLYSLSRGDEEWEDYFKKYPEVQENL

SEQ ID NO: 203 - protein, 319 aa, synthetic construct
  VARIANT 1: note = M or absent or a signal peptide linked via a peptide bond
XTALGRRKAEDRIKETLWADGVKIDEKDFEHIKESHEDYFAVEYGKGSGYYDVNKDMDSEDTALCVGAVVTNMFHWWVDQNRENIEKFLKQDPENNGVMKFNGVKEATVDELNHFYKEYQSDKYADQSRFFDLIKDHFGNKALNPEELFELYFNGFYYNSSHRTIEDNKPAQNNLFSKVLENNKLLNPERSYGIDGFSNNVINALKSHKPLGLGHTTPLRTRHIISMWGADIDQDGKVKAIYVTDSDDREITFNDNSKRRIGMIRYDVLVDDNGNARFTGKGATHKEEGAIYAGLYSLSRGDEEWEDYFKKYPEVQENL

SEQ ID NO: 204 - protein, 319 aa, synthetic construct
  VARIANT 1: note = M or absent or a signal peptide linked via a peptide bond
XTALGRRKAEDRIKETLWADGVKIDEKDFEHIKESHEDYFAVEYGKGSGYYDVNKDMDSEDTALCVGAVVTNMFHWWVDQNRENIEKFLKQDPENNGVMKFNGVKEATVDELNHFYKEYQSDKYADQSRFFDLIKKHFPNKALNPEELFELYFNGFYYNSSHRTIEDNKPAQNNLFSKVLENNKLLNPERSYGIDGFSNNVINALKSHKPLGLGHTTPLRTRHIISMWGADIDQDGKVKAIYVTDSDDREITFNDNSKRRIGMIRYDVLVDDNGNARFTGKGATHKEEGAIYAGLYSLSRGDEEWEDYFKKYPEVQENL

SEQ ID NO: 205 - protein, 319 aa, synthetic construct
  VARIANT 1: note = M or absent or a signal peptide linked via a peptide bond
XTALGRRKAEDRIKETLWADGVKIDEKDFEHIKSSHEDYFAVEYGKGSGYYDVNKKMDSEDTALCVGAVVTNMFHWWVDQNRENIEKFLKQDPENNGVMKFNGVKEATVDELNHFYKEYQSNKYADQSRFFDLIKDHFGNKALNPEELFELYFNGFYYNSSHRYIEDNKPAQNNLFSKVLENNKLLNPERSYGIDGFSNNVKNALKSHKVLGLVHGTPLRYRHIISMWGADIDQDGKVKAIYVTDSDDREITFNDNSKRRIGMIRYDVLVDDNGNIRFTGKGATHKEEGAIYAGLYSLSRGDEEWEDYFKKYPEVQENL

SEQ ID NO: 206 - protein, 319 aa, synthetic construct
  VARIANT 1: note = M or absent or a signal peptide linked via a peptide bond
XTALGRRKAEDRIKETLWADGVKIDEKDFEHIKSSHEDYFAVEYGKGSGYYDVNKKMDSEDTALCVGAVVTNMFHWWVDQNRENIEKFKKQDPENNGVMKFNGVKEATVDELNHFYKEYQSNKYADQSRFFDLIKKHFGNKALNPEELFELYFNGFYYNSSHRYIEDNKPAQNNLFSKVLENNKLLNPERSYGIDGFSNNVKNALKSHKVLGLGHTTPLRTRHIISMWGADIDQDGKVKAIYVTDSDDREITFNDNSKRRIGMIRYDVLVDDNGNIRFTGKGATHKEEGAIYAGLYSLSRGDEVWEDYFKKYPEVQENL

SEQ ID NO: 207 - protein, 319 aa, synthetic construct
  VARIANT 1: note = M or absent or a signal peptide linked via a peptide bond
XTALGRRKAEDRIKETLWADGVKIDEKDFEHIKSSHEDYFAVEYGKGSGYYDVNKKMDSEDTALCVGAVVTNMFHWWVDQNRENIEKFKKQDPENNGVMKFNGVKEATVDELNHFYKEYQSNKYADQSRFFDLIKKHFPNKALNPEELFELYFNGFYYNSSHRYIEDNKPAQNNLFSKVLENNKLLNPERSYGIDGFSNNVKNALKSHKVLGLVHGTPLRTRHIISMWGADIDQDGKVKAIYVTDSDDREITFNDNSKRRIGMIRYDVLVDDNGNIRFTGKGATHKEEGAIYAGLYSLSRGDEVWEDYFKKYPEVQENL

SEQ ID NO: 208 - protein, 319 aa, synthetic construct
  VARIANT 1: note = M or absent or a signal peptide linked via a peptide bond
XTALGRRKAEDRIKETLWADGVKIDEKDFEHIKSSHEDYFAVEYGKGSGYYDVNKKMDSEDTALCVGAVVTNMFHWWVDQNRENIEKFKKQDPENNGVMKFNGVKEATVDELNHFYKEYQSNKYADQSRFFDLIKDHFGNKALNPEELFELYFNGFYYNSSHRYIEDNKPAQNNLFSKVLENNKLLNPERSYGIDGFSNNVKNALKSHKVLGLVHGTPLRTRHIISMWGADIDQDGKVKAIYVTDSDDREITFNDNSKRRIGMIRYDVLVDDNGNIRFTGKGATHKEEGAIYAGLYSLSRGDEVWEDYFKKYPEVQENL

SEQ ID NO: 209 - protein, 319 aa, synthetic construct
  VARIANT 1: note = M or absent or a signal peptide linked via a peptide bond
XTALGRRKAEDRIKETLWADGVKIDEKDFEHIKSSHEDYFAVEYGKGSGYYDVNKKMDSEDTALCVGAVVTNMFHWWVDQNRENIEKFKKQDPENNGVMKFNGVKEATVDELNHFYKEYQSNKYADQSRFFDLIKKHFPNKALNPEELFELYFNGFYYNSSHRTIEDNKPAQNNLFSKVLENNKLLNPERSYGIDGFSNNVKNALKSHKVLGLVHGTPLRTRHIISMWGADIDQDGKVKAIYVTDSDDREITFNDNSKRRIGMIRYDVLVDDNGNIRFTGKGATHKEEGAIYAGLYSLSRGDEVWEDYFKKYPEVQENL

SEQ ID NO: 210 - protein, 319 aa, synthetic construct
  VARIANT 1: note = M or absent or a signal peptide linked via a peptide bond
XTALGRRKAEDRIKETLWADGVKIDEKDFEHIKSSHEDYFAVEYGKGSGYYDVNKKMDSEDTALCVGAVVTNMFHWWVDQNRENIEKFKKQDPENNGVMKFNGVKEATVDELNHFYKEYQSNKYADQSRFFDLIKKHFPNKALNPEELFELYFNGFYYNSSHRTIEDNKPAQNNLFSKVLENNKLLNPERSYGIDGFSNNVKNALKSHKVLGLVHGTPLRTRHIISMWGADIDQDGKVKAIYVTDSDDREITFNDNSKRRIGMIRYDVLVDDNGNARFTGKGATHKEEGAIYAGLYSLSRGDEVWEDYFKKYPEVQENL

SEQ ID NO: 211 - protein, 319 aa, synthetic construct
  VARIANT 1: note = M or absent or a signal peptide linked via a peptide bond
XTALGRRKAEDRIKETLWADGVKIDEKDFEHIKSSHEDYFAVEYGKGSGYYDVNKKMDSEDTALCVGAVVTNMFHWWVDQNRENIEKFLKQDPENNGVMKFNGVKEATVDELNHFYKEYQSNKYADQSRFFDLIKKHFPNKALNPEELFELYFNGFYYNSSHRTIEDNKPAQNNLFSKVLENNKLLNPERSYGIDGFSNNVKNALKSHKVLGLVHGTPLRTRHIISMWGADIDQDGKVKAIYVTDSDDREITFNDNSKRRIGMIRYDVLVDDNGNARFTGKGATHKEEGAIYAGLYSLSRGDEEWEDYFKKYPEVQENL

SEQ ID NO: 212 - protein, 319 aa, synthetic construct
  VARIANT 1: note = M or absent or a signal peptide linked via a peptide bond
XTALGRRKAEDRIKETLWADGVKIDEKDFEHIKSSHEDYFAVEYGKGSGYYDVNKKMDSEDTALCVGAVVTNMFHWWVDQNRENIEKFLKQDPENNGVMKFNGVKEATVDELNHFYKEYQSNKYADQSRFFDLIKDHFGNKALNPEELFELYFNGFYYNSSHRTIEDNKPAQNNLFSKVLENNKLLNPERSYGIDGFSNNVKNALKSHKVLGLVHGTPLRTRHIISMWGADIDQDGKVKAIYVTDSDDREITFNDNSKRRIGMIRYDVLVDDNGNARFTGKGATHKEEGAIYAGLYSLSRGDEEWEDYFKKYPEVQENL

SEQ ID NO: 213 - protein, 319 aa, synthetic construct
  VARIANT 1: note = M or absent or a signal peptide linked via a peptide bond
XTALGRRKAEDRIKETLWADGVKIDEKDFEHIKSSHEDYFAVEYGKGSGYYDVNKKMDSEDTALCVGAVVTNMFHWWVDQNRENIEKFLKQDPENNGVMKFNGVKEATVDELNEFYKEYQSNKYADQSRFFDLIKKHFPNKALNPEELFELYFNGFYYNSSHRTIEDNKPAQNNLFSKVLENNKLLNPERSYGIDGFSNNVKNALKSHKVLGLVHGTPLRTRHIISMWGADIDQDGKVKAIYVTDSDDREITFNDNSKRRIGMIRYDVLVDDNGNARFTGKGATHKEEGAIYAGLYSLSRGDEEWEDYFKKYPEVQENL

SEQ ID NO: 214 - protein, 319 aa, synthetic construct
  VARIANT 1: note = M or absent or a signal peptide linked via a peptide bond
XTALGRRKAEDRIKETLWADGVKIDEKDFEHIKESHEDYFAVEYGKGSGYYDVNKDMDSEDTALCVGAVVTNMFHWWVDQNRENIEKFLKQDPENNGVMKFNGVKEATVDELNHFYKEYQSDKYADQSRFFDLIKDHFGNKALNPEELFELYFNGFYYNSSHRTIEDNKPAQNNLFSKVLENNKLLNPERSYGIDGFSNNVKNALKSHKVLGLVHGTPLRTRHIISMWGADIDQDGKVKAIYITDSDDREITFNDNSKRRIGMIRYDVLVDDNGNARFTGKGATHKEEGAIYAGLYSLSRGDEEWEDYFKKYPEVQENL

SEQ ID NO: 215 - protein, 328 aa, synthetic construct
  VARIANT 1: note = M or absent or a signal peptide linked via a peptide bond
XTALGRRKAEDRIKETLWADGVKIDEKDFEHIKSSHEDYFAVEYGKGSGYYDVNKKMDSEDTALCVGAVVTNMFHWWVDQNRENIEKFKKQDPENNGVMKFNGVKEATVDELNHFYKEYQSNKYADQSRFFDLIKKHFGNKALNPEELFELYFNGFYYNSSHRYIEDNKPAQNNLFSKVLENNKLLNPERSYGIDGFSNNVINALKSHKVLGLVHTTPLRYRHIISMWGADIDQDGKVKAIYVTDSDDRELSNVEALGYNITSGYSDKRYGMIRYDVLVDDNGNIRFTGKGATHKEEGAIYAGLYSLSRGDEVWEDYFKKYPEVQENL

SEQ ID NO: 216 - protein, 323 aa, synthetic construct
  VARIANT 1: note = M or absent or a signal peptide linked via a peptide bond
XTALGRRKAEDRIKETLWADGVKIDEKDFEHIKSSHEDYFAVEYGKGSGYYDVNKKMDSEDTALCVGAVVTNMFHWWVDQNRENIEKFKKQDPENNGVMKFNGVKEATVDELNHFYKEYQSNKYADQSRFFDLIKKHFGNKALNPEELFELYFNGFYYNSSHRYIEDNKPAQNNLFSKVLENNKLLNPERSYGIDGFSNNVINALKSHKVLGLVHTTPLRYRHIISMWGADIDQDGKVKAIYVTDSDDRFLVFGVTYDGSTPVPIGMIRYDVLVDDNGNIRFTGKGATHKEEGAIYAGLYSLSRGDEVWEDYFKKYPEVQENL

SEQ ID NO: 217 - protein, 319 aa, synthetic construct
  VARIANT 1: note = M or absent or a signal peptide linked via a peptide bond
XTALGRRKAEDRIKETLWADGVKIDEKDFEHIKSSHEDYFAVEYGKGSGYYDVNKKMDSEDTALCVGAVVTNMFHWWVDQNRENIEKFKKQDPENNGVMKFNGVKEATVDELNHFYKEYQSNKYADQSRFFDLIKKHFGNKALNPEELFELYFNGFYYNSSHRYIEDNKPAQNNLFSKVLENNKLLNPERSYGIDGFSNNVINALKSHKVLGLVHTTPLRYRHIISMWGADIDQDGKVKAIYVTDSLAKGNNYFGHWHFAVMMIRYDVLVDDNGNIRFTGKGATHKEEGAIYAGLYSLSRGDEVWEDYFKKYPEVQENL

SEQ ID NO: 218 - protein, 320 aa, synthetic construct
  VARIANT 1: note = M or absent or a signal peptide linked via a peptide bond
XTALGRRKAEDRIKETLWADGVKIDDDMEAKGNNYFGHWHFAVATNKGSGYYDVNKKMDSEDTALCVGAVVTNMFHWWVDQNRENIEKFKKQDPENNGVMKFNGVKEATVDELNHFYKEYQSNKYADQSRFFDLIKKHFGNKALNPEELFELYFNGFYYNSSHRYIEDNKPAQNNLFSKVLENNKLLNPERSYGIDGFSNNVINALKSHKVLGLVHTTPLRYRHIISMWGADIDQDGKVKAIYVTDSDDREITFNDNSKRRIGMIRYDVLVDDNGNIRFTGKGATHKEEGAIYAGLYSLSRGDEVWEDYFKKYPEVQENL

SEQ ID NO: 219 - protein, 323 aa, synthetic construct
  VARIANT 1: note = M or absent or a signal peptide linked via a peptide bond
XTALGRRKAEDRIKETLWADGVKIDEKDFEHIKSSHEDYFAVEYGKGSGYYDVNKKMDSEDTALCVGAVVTNMFHWWVDQNRENIEKFKKQDPENNGVMKFNGVKEATVDELNHFYKEYQSNKYADQSRFFDLIKKHFGNKALNPEELFELYFNGFYYNSSHRYIEDNKPAQNNLFSKVLENNKLLNPERSYGIDGFSNNVINALKSHKVVGISGSAGGIKSVDSDGDSYIWGADIDQDGKVKAIYVTDSDDREITFNDNSKRRIGMIRYDVLVDDNGNIRFTGKGATHKEEGAIYAGLYSLSRGDEVWEDYFKKYPEVQENL

SEQ ID NO: 220 - protein, 329 aa, synthetic construct
  VARIANT 1: note = M or absent or a signal peptide linked via a peptide bond
XTALGRRKAEDRIKETLWADGVKIDEKDFEGGGGGKSVDSDGDSYGGGGGAVEYGKGSGYYDVNKKMDSEDTALCVGAVVTNMFHWWVDQNRENIEKFKKQDPENNGVMKFNGVKEATVDELNHFYKEYQSNKYADQSRFFDLIKKHFGNKALNPEELFELYFNGFYYNSSHRYIEDNKPAQNNLFSKVLENNKLLNPERSYGIDGFSNNVINALKSHKVLGLVHTTPLRYRHIISMWGADIDQDGKVKAIYVTDSDDREITFNDNSKRRIGMIRYDVLVDDNGNIRFTGKGATHKEEGAIYAGLYSLSRGDEVWEDYFKKYPEVQENL

SEQ ID NO: 221 - protein, 317 aa, synthetic construct
  VARIANT 1: note = M or absent or a signal peptide linked via a peptide bond
XTALGRRKAEDRIKETLWADGVKIDEKDFEHIKSSHEDYFAVEYGKGSGYYDVNKKMDSEDTALCVGAVVTNMFHWWVDQNRENIEKFKKQDPENNGVMKFNGVKEATVDELNHFYKEYQSNKYADQSRFFDLIKKHFGNKALNPEELFELYFNGFYYNSSHRYIEDNKPAQNNLFSKVLENNKLLNPERSYGIDGFSNNVINALKSHKVLGLVHTTPLRYRHIISMWGADIDQDGKVKAIYVTDSDTKSVDSDGDSYKINYRYDVLVDDNGNIRFTGKGATHKEEGAIYAGLYSLSRGDEVWEDYFKKYPEVQENL

SEQ ID NO: 222 - protein, 330 aa, synthetic construct
  VARIANT 1: note = M or absent or a signal peptide linked via a peptide bond
XTALGRRKAEDRIKETLWADGVKIDEKDFEHIKSSHEDYFAVEYGKGSGYYDVNKKMDSEDTALCVGAVVTNMFHWWVDQNRENIEKFKKQDPENNGVMKFNGVKEATVDELNHFYKEYQSNKYADQSRFFDLIKKHFGNKALNPEELFELYFNGFYYNSSHRYIEDNKPAQNNLFSKVLENNKLLNPERSYGIDGFSNNVINALKSHKVLGLVHTTPLRYRHIISMWGADIDQDGKVKAIYVTDSDDRELLKPKILGYNITSGYSDEIYRIGMIRYDVLVDDNGNIRFTGKGATHKEEGAIYAGLYSLSRGDEVWEDYFKKYPEVQENL

SEQ ID NO: 223 - protein, 323 aa, synthetic construct
  VARIANT 1: note = M or absent or a signal peptide linked via a peptide bond
XTALGRRKAEDRIKETLWADGVKIDEKDFEHIKSSHEDYFAVEYGKGSGYYDVNKKMDSEDTALCVGAVVTNMFHWWVDQNRENIEKFKKQDPENNGVMKFNGVKEATVDELNHFYKEYQSNKYADQSRFFDLIKKHFGNKALNPEELFELYFNGFYYNSSHRYIEDNKPAQNNLFSKVLENNKLLNPERSYGIDGFSNNVINALKSHKVLGLVHTTPLRYRHIISMWGADIDQDGKVKAIYVTDSDDREITFNVTYDGSTKRRIGMIRYDVLVDDNGNIRFTGKGATHKEEGAIYAGLYSLSRGDEVWEDYFKKYPEVQENL

SEQ ID NO: 224 - protein, 315 aa, synthetic construct
  VARIANT 1: note = M or absent or a signal peptide linked via a peptide bond
XTALGRRKAEDRIKETLWADGVKIDEKDFEHIKSSHEDYFAVEYGKGSGYYDVNKKMDSEDTALCVGAVVTNMFHWWVDQNRENIEKFKKQDPENNGVMKFNGVKEATVDELNHFYKEYQSNKYADQSRFFDLIKKHFGNKALNPEELFELYFNGFYYNSSHRYIEDNKPAQNNLFSKVLENNKLLNPERSYGIDGFSNNVINALKSHKVLGLVHTTPLRYRHIISMWGADIDQDGKVKAIYTGAKGNNYFGHWHFAVRVRLDVLVDDNGNIRFTGKGATHKEEGAIYAGLYSLSRGDEVWEDYFKKYPEVQENL

SEQ ID NO: 225 - protein, 333 aa, synthetic construct
  VARIANT 1: note = M or absent or a signal peptide linked via a peptide bond
XTALGRRKAEDRIKETLWADGVKIDEKDFEHIGGGGGKSVDSDGDSYGGGGGYFAVEYGKGSGYYDVNKKMDSEDTALCVGAVVTNMFHWWVDQNRENIEKFKKQDPENNGVMKFNGVKEATVDELNHFYKEYQSNKYADQSRFFDLIKKHFGNKALNPEELFELYFNGFYYNSSHRYIEDNKPAQNNLFSKVLENNKLLNPERSYGIDGFSNNVINALKSHKVLGLVHTTPLRYRHIISMWGADIDQDGKVKAIYVTDSDDREITFNDNSKRRIGMIRYDVLVDDNGNIRFTGKGATHKEEGAIYAGLYSLSRGDEVWEDYFKKYPEVQENL

SEQ ID NO: 226 - protein, 326 aa, synthetic construct
  VARIANT 1: note = M or absent or a signal peptide linked via a peptide bond
XTALGRRKAEDRIKETLWADGVKIDEKDFEHIKSSHEDYFAVEYGKGSGYYDVNKKMDSEDTALCVGAVVTNMFHWWVDQNRENIEKFKKQDPENNGVMKFNGVKEATVDELNVMYKGKKLLEAARAGQPDSSESRFFDLIKKHFGNKALNPEELFELYFNGFYYNSSHRYIEDNKPAQNNLFSKVLENNKLLNPERSYGIDGFSNNVINALKSHKVLGLVHTTPLRYRHIISMWGADIDQDGKVKAIYVTDSDDREITFNDNSKRRIGMIRYDVLVDDNGNIRFTGKGATHKEEGAIYAGLYSLSRGDEVWEDYFKKYPEVQENL

SEQ ID NO: 227 - protein, 331 aa, synthetic construct
  VARIANT 1: note = M or absent or a signal peptide linked via a peptide bond
XTALGRRKAEDRIKETLWADGVKIDEKDFEHIKSSHEDYFAVEYGKGSGYYDVNKKMDSEDTALCVGAVVTNMFHWWVDQNRENIEKFKKQDPENNGVMKFNGVKEATVDELNHFYKEYQSNKYADQSRFFDLIKKHFGNKALNPEELFELYFNGFYYNSSHRYIEDNKPAQNNLFSKVLENNKLLNPERSYGIDGFSNNVINALKSHKVLGLVHTTPLRYRHIISMWGADIDQDGKVKAIYVTDGHYGVYNGVTYWGHTPLHLAAMLGHLVYGLYRYDVLVDDNGNIRFTGKGATHKEEGAIYAGLYSLSRGDEVWEDYFKKYPEVQENL

SEQ ID NO: 228 - protein, 316 aa, synthetic construct
  VARIANT 1: note = M or absent or a signal peptide linked via a peptide bond
XTALGRRKAEDRIKETLWADGVKIDEKDFEHIKSSHEDYFAVEYGKGSGYYDVNKKMDSEDTALCVGAVVTNMFHWWVDQNRENIEKFKKQDPENNGVMKFNGVKEATVDELNHFYKEYQSNKYADQSRFFDLIKKHFGNKALNPEELFELYFNGFYYNSSHRYIEDNKPAQNNLFSKVLENNKLLNPERSYGIDGFSNNVINALKSHKVLGLVHTTPLRYRHIISMWGADIDQDGKVKAIYVTDQRTPLHLAAWADHLYRRYDVLVDDNGNIRFTGKGATHKEEGAIYAGLYSLSRGDEVWEDYFKKYPEVQENL

SEQ ID NO: 229 - protein, 318 aa, synthetic construct
  VARIANT 1: note = M or absent or a signal peptide linked via a peptide bond
XTALGRRKAEDRIKETLWADGVKIDEKDFEHIKSSHEDYFAVEYGKGSGYYDVNKKMDSEDTALCVGAVVTNMFHWWVDQNRENIEKFKKQDPENNGVMKFNGVKEATVDELNHFYKEYQSNKYADQSRFFDLIKKHFGNKALNPEELFELYFNGFYYNSSHRYIEDNKPAQNNLFSKVLENNKLLNPERSYGIDGFSNNVINALKSHKVLGLVHTTPLRYRHIISMWGADIDQDGKVKAIYVTDSGGFAFDISIDNGNEDVYRYDVLVDDNGNIRFTGKGATHKEEGAIYAGLYSLSRGDEVWEDYFKKYPEVQENL

SEQ ID NO: 230 - protein, 334 aa, synthetic construct
  VARIANT 1: note = M or absent or a signal peptide linked via a peptide bond
XTALGRRKAEDRIKETLWADGVKIDEKGEIVAFDISIDNGNEDLAEILQLSTYDGGGEYGKGSGYYDVNKKMDSEDTALCVGAVVTNMFHWWVDQNRENIEKFKKQDPENNGVMKFNGVKEATVDELNHFYKEYQSNKYADQSRFFDLIKKHFGNKALNPEELFELYFNGFYYNSSHRYIEDNKPAQNNLFSKVLENNKLLNPERSYGIDGFSNNVINALKSHKVLGLVHTTPLRYRHIISMWGADIDQDGKVKAIYVTDSDDREITFNDNSKRRIGMIRYDVLVDDNGNIRFTGKGATHKEEGAIYAGLYSLSRGDEVWEDYFKKYPEVQENL

SEQ ID NO: 231 - protein, 333 aa, synthetic construct
  VARIANT 1: note = M or absent or a signal peptide linked via a peptide bond
XTALGRRKAEDRIKETLWADGVKIDDDMEAKGNNYFGHWHFAVATNKGSGYYDVNKKMDSEDTALCVGAVVTNMFHWWVDQNRENIEKFKKQDPENNGVMKFNGVKEATVDELNHFYKEYQSNKYADQSRFFDLIKKHFGNKALNPEELFELYFNGFYYNSSHRYIEDNKPAQNNLFSKVLENNKLLNPERSYGIDGFSNNVINALKSHKVVGISGSAGGIKSVDSDGDSYIWGADIDQDGKVKAIYVTDSDDRELSNVEALGYNITSGYSDKRYGMIRYDVLVDDNGNIRFTGKGATHKEEGAIYAGLYSLSRGDEVWEDYFKKYPEVQENL

SEQ ID NO: 232 - protein, 329 aa, synthetic construct
  VARIANT 1: note = M or absent or a signal peptide linked via a peptide bond
XTALGRRKAEDRIKETLWADGVKIDDDMEAKGNNYFGHWHFAVATNKGSGYYDVNKKMDSEDTALCVGAVVTNMFHWWVDQNRENIEKFKKQDPENNGVMKFNGVKEATVDELNHFYKEYQSNKYADQSRFFDLIKKHFGNKALNPEELFELYFNGFYYNSSHRYIEDNKPAQNNLFSKVLENNKLLNPERSYGIDGFSNNVINALKSHKVLGLVHTTPLRYRHIISMWGADIDQDGKVKAIYVTDSDDRELSNVEALGYNITSGYSDKRYGMIRYDVLVDDNGNIRFTGKGATHKEEGAIYAGLYSLSRGDEVWEDYFKKYPEVQENL

SEQ ID NO: 233 - protein, 338 aa, synthetic construct
  VARIANT 1: note = M or absent or a signal peptide linked via a peptide bond
XTALGRRKAEDRIKETLWADGVKIDEKDFEGGGGGKSVDSDGDSYGGGGGAVEYGKGSGYYDVNKKMDSEDTALCVGAVVTNMFHWWVDQNRENIEKFKKQDPENNGVMKFNGVKEATVDELNHFYKEYQSNKYADQSRFFDLIKKHFGNKALNPEELFELYFNGFYYNSSHRYIEDNKPAQNNLFSKVLENNKLLNPERSYGIDGFSNNVINALKSHKVLGLVHTTPLRYRHIISMWGADIDQDGKVKAIYVTDSDDRELSNVEALGYNITSGYSDKRYGMIRYDVLVDDNGNIRFTGKGATHKEEGAIYAGLYSLSRGDEVWEDYFKKYPEVQENL

SEQ ID NO: 234 - protein, 332 aa, synthetic construct
  VARIANT 1: note = M or absent or a signal peptide linked via a peptide bond
XTALGRRKAEDRIKETLWADGVKIDEKDFEHIKSSHEDYFAVEYGKGSGYYDVNKKMDSEDTALCVGAVVTNMFHWWVDQNRENIEKFKKQDPENNGVMKFNGVKEATVDELNHFYKEYQSNKYADQSRFFDLIKKHFGNKALNPEELFELYFNGFYYNSSHRYIEDNKPAQNNLFSKVLENNKLLNPERSYGIDGFSNNVINALKSHKVVGISGSAGGIKSVDSDGDSYIWGADIDQDGKVKAIYVTDSDDRELSNVEALGYNITSGYSDKRYGMIRYDVLVDDNGNIRFTGKGATHKEEGAIYAGLYSLSRGDEVWEDYFKKYPEVQENL

SEQ ID NO: 235 - protein, 328 aa, synthetic construct
  VARIANT 1: note = M or absent or a signal peptide linked via a peptide bond
XTALGRRKAEDRIKETLWADGVKIDDDMEAKGNNYFGHWHFAVATNKGSGYYDVNKKMDSEDTALCVGAVVTNMFHWWVDQNRENIEKFKKQDPENNGVMKFNGVKEATVDELNHFYKEYQSNKYADQSRFFDLIKKHFGNKALNPEELFELYFNGFYYNSSHRYIEDNKPAQNNLFSKVLENNKLLNPERSYGIDGFSNNVINALKSHKVVGISGSAGGIKSVDSDGDSYIWGADIDQDGKVKAIYVTDSDDRFLVFGVTYDGSTPVPIGMIRYDVLVDDNGNIRFTGKGATHKEEGAIYAGLYSLSRGDEVWEDYFKKYPEVQENL

SEQ ID NO: 236 - protein, 324 aa, synthetic construct
  VARIANT 1: note = M or absent or a signal peptide linked via a peptide bond
XTALGRRKAEDRIKETLWADGVKIDDDMEAKGNNYFGHWHFAVATNKGSGYYDVNKKMDSEDTALCVGAVVTNMFHWWVDQNRENIEKFKKQDPENNGVMKFNGVKEATVDELNHFYKEYQSNKYADQSRFFDLIKKHFGNKALNPEELFELYFNGFYYNSSHRYIEDNKPAQNNLFSKVLENNKLLNPERSYGIDGFSNNVINALKSHKVLGLVHTTPLRYRHIISMWGADIDQDGKVKAIYVTDSDDRFLVFGVTYDGSTPVPIGMIRYDVLVDDNGNIRFTGKGATHKEEGAIYAGLYSLSRGDEVWEDYFKKYPEVQENL

SEQ ID NO: 237 - protein, 333 aa, synthetic construct
  VARIANT 1: note = M or absent or a signal peptide linked via a peptide bond
XTALGRRKAEDRIKETLWADGVKIDEKDFEGGGGGKSVDSDGDSYGGGGGAVEYGKGSGYYDVNKKMDSEDTALCVGAVVTNMFHWWVDQNRENIEKFKKQDPENNGVMKFNGVKEATVDELNHFYKEYQSNKYADQSRFFDLIKKHFGNKALNPEELFELYFNGFYYNSSHRYIEDNKPAQNNLFSKVLENNKLLNPERSYGIDGFSNNVINALKSHKVLGLVHTTPLRYRHIISMWGADIDQDGKVKAIYVTDSDDRFLVFGVTYDGSTPVPIGMIRYDVLVDDNGNIRFTGKGATHKEEGAIYAGLYSLSRGDEVWEDYFKKYPEVQENL

SEQ ID NO: 238 - protein, 327 aa, synthetic construct
  VARIANT 1: note = M or absent or a signal peptide linked via a peptide bond
XTALGRRKAEDRIKETLWADGVKIDEKDFEHIKSSHEDYFAVEYGKGSGYYDVNKKMDSEDTALCVGAVVTNMFHWWVDQNRENIEKFKKQDPENNGVMKFNGVKEATVDELNHFYKEYQSNKYADQSRFFDLIKKHFGNKALNPEELFELYFNGFYYNSSHRYIEDNKPAQNNLFSKVLENNKLLNPERSYGIDGFSNNVINALKSHKVVGISGSAGGIKSVDSDGDSYIWGADIDQDGKVKAIYVTDSDDRFLVFGVTYDGSTPVPIGMIRYDVLVDDNGNIRFTGKGATHKEEGAIYAGLYSLSRGDEVWEDYFKKYPEVQENL

SEQ ID NO: 239 - protein, 329 aa, synthetic construct
  VARIANT 1: note = M or absent or a signal peptide linked via a peptide bond
XTALGRRKAEDRIKETLWADGVKIDEKDFEGGGGGKSVDSDGDSYGGGGGAVEYGKGSGYYDVNKKMDSEDTALCVGAVVTNMFHWWVDQNRENIEKFKKQDPENNGVMKFNGVKEATVDELNHFYKEYQSNKYADQSRFFDLIKKHFGNKALNPEELFELYFNGFYYNSSHRYIEDNKPAQNNLFSKVLENNKLLNPERSYGIDGFSNNVINALKSHKVLGLVHTTPLRYRHIISMWGADIDQDGKVKAIYVTDSLAKGNNYFGHWHFAVMMIRYDVLVDDNGNIRFTGKGATHKEEGAIYAGLYSLSRGDEVWEDYFKKYPEVQENL

SEQ ID NO: 240 - protein, 323 aa, synthetic construct
  VARIANT 1: note = M or absent or a signal peptide linked via a peptide bond
XTALGRRKAEDRIKETLWADGVKIDEKDFEHIKSSHEDYFAVEYGKGSGYYDVNKKMDSEDTALCVGAVVTNMFHWWVDQNRENIEKFKKQDPENNGVMKFNGVKEATVDELNHFYKEYQSNKYADQSRFFDLIKKHFGNKALNPEELFELYFNGFYYNSSHRYIEDNKPAQNNLFSKVLENNKLLNPERSYGIDGFSNNVINALKSHKVVGISGSAGGIKSVDSDGDSYIWGADIDQDGKVKAIYVTDSLAKGNNYFGHWHFAVMMIRYDVLVDDNGNIRFTGKGATHKEEGAIYAGLYSLSRGDEVWEDYFKKYPEVQENL

SEQ ID NO: 241 - protein, 318 aa, synthetic construct
  VARIANT 1: note = M or absent or a signal peptide linked via a peptide bond
XTALGRRKAEDRIKETLWADGVKIDDDMEAKGNNYFGHWHFAVATNKGSGYYDVNKKMDSEDTALCVGAVVTNMFHWWVDQNRENIEKFKKQDPENNGVMKFNGVKEATVDELNHFYKEYQSNKYADQSRFFDLIKKHFGNKALNPEELFELYFNGFYYNSSHRYIEDNKPAQNNLFSKVLENNKLLNPERSYGIDGFSNNVINALKSHKVLGLVHTTPLRYRHIISMWGADIDQDGKVKAIYVTDSDTKSVDSDGDSYKINYRYDVLVDDNGNIRFTGKGATHKEEGAIYAGLYSLSRGDEVWEDYFKKYPEVQENL

SEQ ID NO: 242 - protein, 321 aa, synthetic construct
  VARIANT 1: note = M or absent or a signal peptide linked via a peptide bond
XLDTALGRRKAEERIKETLWVDGVKIDEKDFEHMSSSHEDYFAAEYGKGSGYYDVNKKMDSGDSALCVASVVTNMFHWWVDQNRDNIEKFKKQDIENNGVMKFNGVRQTTVDELNHFYKEYNSNKYADQSKFFDLIKKHFGNRALNPEELFELYFNGFYYNSSQRYIEDNKPAQNNLFSKVLENNKLLNPERSYGIDGFSNNVINALKSHKVLGLVHTTPLRYRHIISMWGADIDQDGKVKAIYVTDSDDREITFNDNSKRRIGMKRYDVLVDDFGNIRFTGKGATHKEEGAIYAGLYSLSRGDEVWEDYFKKYPEVQENL

SEQ ID NO: 243 - protein, 321 aa, synthetic construct
  VARIANT 1: note = M or absent or a signal peptide linked via a peptide bond
XLDTALGRRKAEERIKETLWVDGVKIDEKDFEHMSSSHEDYFAAEYGKGSGYYDVNKKMDSGDSALCVASVVTNMFHWWVDQNRDNIEKFKKQDIENNGVMKFNGVRETTVDELNHFYKEYNSNKYADQSKFFDLIKKHFGNRALNPEELFELYFNGFYYNSSQRYIEDNKPAQNNLFSKVLENNKLLNPERSYGIDGFSNNVINALKSHKVLGLVHTTPLRYRHIISMWGADIDQDGKVKAIYVTDSDDREITFNDNSKRRIGMKRYDVLVDDFGNIRFTGKGATHKEEGAIYAGLYSLSRGDEVWEDYFKKYPEVQENL

SEQ ID NO: 244 - protein, 20 aa, synthetic construct
METDTLLLWVLLLWVPGSTG

SEQ ID NO: 245 - protein, 8 aa, synthetic construct
LEHHHHHH

SEQ ID NO: 246 - protein, 546 aa, synthetic construct
ASTQSPSVFPLTRCCKNIPSNATSVTLGCLATGYFPEPVMVTWDTGSLNGTTMTLPATTLTLSGHYATISLLTVSGAWAKQMFTCRVAHTPSSTDWVDNKTFSVCSRDFTPPTVKILQSSCDGGGHFPPTIQLLCLVSGYTPGTINITWLEDGQVMDVDLSTASTTQEGELASTQSELTLSQKHWLSDRTYTCQVTYQGHTFEDSTKKCADSNPRGVSAYLSRPSPFDLFIRKSPTITCLVVDLAPSKGTVNLTWSRASGKPVNHSTRKEEKQRNGTLTVTSTLPVGTRDWIEGETYQCRVTHPHLPRALMRSTTKTSGPRAAPEVYAFATPEWPGSRDKRTLACLIQNFMPEDISVQWLHNEVQLPDARHSTTQPRKTKGSGFFVFSRLEVTRAEWEQKDEFICRAVHEAASPSQTVQRAVSVNPGLAGGSAQSQRAPDRVLCHSGQQQGLPRAAGGSVPHPRCHCGAGRADWPGPPELDVCVEEAEGEAPWTWTGLCIFAALFLLSVSYSAAITLLMVQRFLSATRQGRPQTSLDYTNVLQPHA

SEQ ID NO: 247 - protein, 321 aa, synthetic construct
  VARIANT 1: note = M or absent or a signal peptide linked via a peptide bond
XLDTALGRRKAEERIKETLWVDGVKIDEKDFEHMSSSHEDYFAAEYGKGSGYYDVNKKMDSGDSALCVASVVTNMFHWWVDQNRDNIEKFKKQDIENNGVMKFNGVRQTTVDELNHFYKEYNSNKYADQSKFFDLIKSHFGNRALNPEELFELYFNGFYYNSSQRYIEDNKPAQNNLFSKVLENNKLLNPERSYGIDGFSNNVINALKSHKVLGLVHTTPLRYRHIISMWGADIDQDGKVKAIYVTDSDDREITFNDNSKRRIGMKRYDVLVDDFGNIRFTGKGATHKEEGAIYAGLYSLSRGDEVWEDYFKKYPEVQENL

SEQ ID NO: 248 - protein, 61 aa, synthetic construct
MKKQSFTHSRKPKFGMRKLSIGLASCMLGMMFLTTGHVNADDVDHVGETITVVPWQRNNLD

SEQ ID NO: 249 - protein, 52 aa, synthetic construct
MKKQSFTHSRKPKFGMRKLSIGLASCMLGMMFLTTGHVNADDVDHVGETITV

SEQ ID NO: 250 - protein, 7 aa, synthetic construct
GVSAYLS

SEQ ID NO: 251 - protein, 318 aa, synthetic construct
  VARIANT 1: note = M or absent or a signal peptide linked via a peptide bond
XTALGRRKAEDRIKETLWADGVKIDEKDFEHIKSSHEDYFAVEYGKGSGYYDVNKKMDSEDSALCVGAVVTNMFHWWVDQNRENIEKFKKQDPENNGVMKFEGVKEATVDELNEFYRDNRDNYADQSRFFDLIKKHFGNKALNPEELFELYFNGFYYGSSHRYIEDNEPAQNNLFSKVLENNKLLNPERSYGIDGFSNNVINALKSHKVLGLVYTTPLRYRHIISMWGADIDQDGKVKAIYVTDSDDREITFNDNSKRRIGMIRYDVLVDDNGNIRFTGKGATHKEEGAIYAGLYSLSRGDEVWEDYFKKYPEVQENL

SEQ ID NO: 252 - protein, 330 aa, synthetic construct [sequence omitted]

SEQ ID NO: 253 - protein, 226 aa, synthetic construct
DKTHTCPPCPAPEAAGAPSVFLFPPKPKDTLMISRTPEVTCVVVDVSHEDPEVKFNWYVDGVEVHNAKTKPREEQQNSTYRVVSVLTVLHQDWLNGKEYKCKVSNKALKAPIEKTISKAKGQPREPQVYTLPPSRDELTKNQVSLWCLVKGFYPSDIAVEWESNGQPENNYKTTPPVLDSDGSFFLYSKLTVDKSRWQQGNVFSCSVMHEALHNHYTQKSLSLSPG

SEQ ID NO: 254 - protein, 226 aa, synthetic construct
DKTHTCPPCPAPEAAGAPSVFLFPPKPKDTLMISRTPEVTCVVVDVSHEDPEVKFNWYVDGVEVHNAKTKPREEQQNSTYRVVSVLTVLHQDWLNGKEYKCKVSNKALKAPIEKTISKAKGQPREPQVYTLPPCRDELTKNQVSLWCLVKGFYPSDIAVEWESNGQPENNYKTTPPVLDSDGSFFLYSKLTVDKSRWQQGNVFSCSVMHEALHNHYTQKSLSLSPG

SEQ ID NO: 255 - protein, 226 aa, synthetic construct
DKTHTCPPCPAPEAAGAPSVFLFPPKPKDTLMISRTPEVTCVVVDVSHEDPEVKFNWYVDGVEVHNAKTKPREEQQNSTYRVVSVLTVLHQDWLNGKEYKCKVSNKALKAPIEKTISKAKGQPREPQVYTLPPSRDELTKNQVSLSCAVKGFYPSDIAVEWESNGQPENNYKTTPPVLDSDGSFFLVSKLTVDKSRWQQGNVFSCSVMHEALHNHYTQKSLSLSPG

SEQ ID NO: 256 - protein, 226 aa, synthetic construct
DKTHTCPPCPAPEAAGAPSVFLFPPKPKDTLMISRTPEVTCVVVDVSHEDPEVKFNWYVDGVEVHNAKTKPREEQQNSTYRVVSVLTVLHQDWLNGKEYKCKVSNKALKAPIEKTISKAKGQPREPQVCTLPPSRDELTKNQVSLSCAVKGFYPSDIAVEWESNGQPENNYKTTPPVLDSDGSFFLVSKLTVDKSRWQQGNVFSCSVMHEALHNHYTQKSLSLSPG

SEQ ID NO: 257 - protein, 558 aa, synthetic construct
DKTHTCPPCPAPEAAGAPSVFLFPPKPKDTLMISRTPEVTCVVVDVSHEDPEVKFNWYVDGVEVHNAKTKPREEQQNSTYRVVSVLTVLHQDWLNGKEYKCKVSNKALKAPIEKTISKAKGQPREPQVYTLPPSRDELTKNQVSLWCLVKGFYPSDIAVEWESNGQPENNYKTTPPVLDSDGSFFLYSKLTVDKSRWQQGNVFSCSVMHEALHNHYTQKSLSLSPGAEEEKAEEEKAEEEKTALGRRKAEDRIKETLWADGVKIDEKDFEHIKSSHEDYFAVEYGKGSGYYDVNKKMDSEDSALCVGAVVTNMFHWWVDQNRENIEKFKKQDPENNGVMKFEGVKEATVDELNEFYRDNRDNYADQSRFFDLIKKHFGNKALNPEELFELYFNGFYYGSSHRYIEDNEPAQNNLFSKVLENNKLLNPERSYGIDGFSNNVINALKSHKVLGLVYTTPLRYRHIISMWGADIDQDGKVKAIYVTDSDDREITFNDNSKRRIGMIRYDVLVDDNGNIRFTGKGATHKEEGAIYAGLYSLSRGDEVWEDYFKKYPEVQENL

SEQ ID NO: 258 - protein, 543 aa, synthetic construct
TALGRRKAEDRIKETLWADGVKIDEKDFEHIKSSHEDYFAVEYGKGSGYYDVNKKMDSEDSALCVGAVVTNMFHWWVDQNRENIEKFKKQDPENNGVMKFEGVKEATVDELNEFYRDNRDNYADQSRFFDLIKKHFGNKALNPEELFELYFNGFYYGSSHRYIEDNEPAQNNLFSKVLENNKLLNPERSYGIDGFSNNVINALKSHKVLGLVYTTPLRYRHIISMWGADIDQDGKVKAIYVTDSDDREITFNDNSKRRIGMIRYDVLVDDNGNIRFTGKGATHKEEGAIYAGLYSLSRGDEVWEDYFKKYPEVQENLDKTHTCPPCPAPEAAGAPSVFLFPPKPKDTLMISRTPEVTCVVVDVSHEDPEVKFNWYVDGVEVHNAKTKPREEQQNSTYRVVSVLTVLHQDWLNGKEYKCKVSNKALKAPIEKTISKAKGQPREPQVYTLPPSRDELTKNQVSLWCLVKGFYPSDIAVEWESNGQPENNYKTTPPVLDSDGSFFLYSKLTVDKSRWQQGNVFSCSVMHEALHNHYTQKSLSLSPG

SEQ ID NO: 259 - protein, 543 aa, synthetic construct
TALGRRKAEDRIKETLWADGVKIDEKDFEHIKSSHEDYFAVEYGKGSGYYDVNKKMDSEDSALCVGAVVTNMFHWWVDQNRENIEKFKKQDPENNGVMKFEGVKEATVDELNEFYRDNRDNYADQSRFFDLIKKHFGNKALNPEELFELYFNGFYYGSSHRYIEDNEPAQNNLFSKVLENNKLLNPERSYGIDGFSNNVINALKSHKVLGLVYTTPLRYRHIISMWGADIDQDGKVKAIYVTDSDDREITFNDNSKRRIGMIRYDVLVDDNGNIRFTGKGATHKEEGAIYAGLYSLSRGDEVWEDYFKKYPEVQENLDKTHTCPPCPAPEAAGAPSVFLFPPKPKDTLMISRTPEVTCVVVDVSHEDPEVKFNWYVDGVEVHNAKTKPREEQQNSTYRVVSVLTVLHQDWLNGKEYKCKVSNKALKAPIEKTISKAKGQPREPQVYTLPPSRDELTKNQVSLTCLVKGFYPSDIAVEWESNGQPENNYKTTPPVLDSDGSFFLYSKLTVDKSRWQQGNVFSCSVMHEALHNHYTQKSLSLSPG

SEQ ID NO: 260 - protein, 5 aa, synthetic construct
GGGGS

SEQ ID NO: 261 - protein, 10 aa, synthetic construct
GGGGSGGGGS

SEQ ID NO: 262 - protein, 15 aa, synthetic construct
GGGGSGGGGSGGGGS

SEQ ID NO: 263 - protein, 16 aa, synthetic construct
GGGGSGGGGSGGGGSG

SEQ ID NO: 264 - protein, 5 aa, synthetic construct
GGGSK

SEQ ID NO: 265 - protein, 10 aa, synthetic construct
GGGSKGGGSK

SEQ ID NO: 266 - protein, 15 aa, synthetic construct
GGGSKGGGSKGGGSK

SEQ ID NO: 267 - protein, 20 aa, synthetic construct
GGGSKGGGSKGGGSKGGGSK

SEQ ID NO: 268 - protein, 21 aa, synthetic construct
GGGGSGGGGSGGGGSGGGGSG

SEQ ID NO: 269 - protein, 11 aa, synthetic construct
GGGGSGGGGSG

SEQ ID NO: 270 - protein, 20 aa, synthetic construct
GGGGSGGGGSGGGGSGGGGS

SEQ ID NO: 271 - protein, 8 aa, synthetic construct
GGGGGGGG

SEQ ID NO: 272 - protein, 6 aa, synthetic construct
GGGGGG

SEQ ID NO: 273 - protein, 5 aa, synthetic construct
EAAAK

SEQ ID NO: 274 - protein, 4 aa, synthetic construct
EAAK

SEQ ID NO: 275 - protein, 8 aa, synthetic construct
EAAKEAAK

SEQ ID NO: 276 - protein, 12 aa, synthetic construct
EAAKEAAKEAAK

SEQ ID NO: 277 - protein, 46 aa, synthetic construct
AEAAAKEAAAKEAAAKEAAAKALEAEAAAKEAAAKEAAAKEAAAKA

SEQ ID NO: 278 - protein, 12 aa, synthetic construct
AEAAAKEAAAKA

SEQ ID NO: 279 - protein, 15 aa, synthetic construct
AEEEKAEEEKAEEEK

SEQ ID NO: 280 - protein, 319 aa, synthetic construct
  VARIANT 1: note = M or absent or a signal peptide linked via a peptide bond
XTALGRRKAEDRIKETLWADGVKIDEKDFEHIKSSHEDYFAVEYGKGSGYYDVNKKEDSEDTALCVGAVVTNMFHWWVDQNRENIEKFKKQDPENNGVMKFNGVKEATVDELNHFYKEYQSNKYADQSRFFDLIKKHFGNKALNPEELFELYFNGFYYNSSHRYIEDNKPAQNNLFSKVLENNKLLNPERSYGIDGFSNNVINALKSHKVLGLVHTTPLRYRHIISMWGADIDQDGKVKAIYVTDSDDREITFNDNSKRRIGMKRYDVLVDDNGNIRFTGKGATHKEEGAIYAGLYSLSRGDEVWEDYFKKYPEVQENL

SEQ ID NO: 281 - protein, 319 aa, synthetic construct
  VARIANT 1: note = M or absent or a signal peptide linked via a peptide bond
XTALGRRKAEDRIKETLWADGVKIDEKDFEHIKSSHEDYFAVEYGKGSGYYDVNKKFDSEDTALCVGAVVTNMFHWWVDQNRENIEKFKKQDPENNGVMKFNGVKEATVDELNHFYKEYQSNKYADQSRFFDLIKKHFGNKALNPEELFELYFNGFYYNSSHRYIEDNKPAQNNLFSKVLENNKLLNPERSYGIDGFSNNVINALKSHKVLGLVHTTPLRYRHIISMWGADIDQDGKVKAIYVTDSDDREITFNDNSKRRIGMKRYDVLVDDNGNIRFTGKGATHKEEGAIYAGLYSLSRGDEVWEDYFKKYPEVQENL

SEQ ID NO: 282 - protein, 319 aa, synthetic construct
  VARIANT 1: note = M or absent or a signal peptide linked via a peptide bond
XTALGRRKAEDRIKETLWADGVKIDEKDFEHIKSSHEDYFAVEYGKGSGYYDVNKKMDSEDTALCVGAVVTNMFHWWVDQNRENIEKFKKQDPENNGVMKFNGVKEATVDELNHFYKEYQSNKYADQSRFFDLIKKHFGNKALNPEELFELYFNGFYYNSSHRYIEDNKPAQNNLFSKVLENNKLLNPERSYGIDGFSNNVINALKSHKVLGLVHTTPLRYRHIISMWGADIDQDGKVKAIYVTDSDDREITFNDNSKRRIGMKRYDVLVDDNGNIRFTGKGATHKERGAIYAGLYSLSRGDEVWEDYFKKYPEVQENL

SEQ ID NO: 283 - protein, 319 aa, synthetic construct
  VARIANT 1: note = M or absent or a signal peptide linked via a peptide bond
XTALGRRKAEDRIKETLWADGVKIDEKDFEHIKSSHEDYFAVEYGKGSGYYDVNKKMDSEDTALCVGAVVTNMFHWWVDQNRENIEKFKKQDPENNGVMKFNGVKEATVDELNHFYKEYQSNKYADQSRFFDLIKKHFGNKALNPEELFELYFNGFYYNSSHRYIEDNKPAQNNLFSKVLENNKLLNPERSYGIDGFSNNVINALKSHKVLGLVHTTPLRYRHIISMWGADIDQDGKVKAIYVTDSDDREITFNDNSKRRIGMKRYDVLVDDNGNIRFTGKGATHKREGAIYAGLYSLSRGDEVWEDYFKKYPEVQENL

SEQ ID NO: 284 - protein, 319 aa, synthetic construct
  VARIANT 1: note = M or absent or a signal peptide linked via a peptide bond
XTALGRRKAEDRIKETLWADGVKIDEKDFEHIKSSHEDYFAVEYGKGSGYYDVNKKMDSEDTALCVGAVVTNMFHWWVDQNRENIEKFKKQDPENNGVMKFNGVKEATVDELNHFYKEYQSNKYADQSRFFDLIKKHFGNKALNPEELFELYFNGFYYNSSHRYIEDNKPAQNNLFSKVLENNKLLNPERSYGIDGFSNNVINALKSHKVLGLVHTTPLRYRHIISMWGADIDQDGKVKAIYVTDSDDREITFNDNSKRRIGMKRYDVLVDDNGNIRFTGKGATHKEEGARYAGLYSLSRGDEVWEDYFKKYPEVQENL

SEQ ID NO: 285 - protein, 319 aa, synthetic construct
  VARIANT 1: note = M or absent or a signal peptide linked via a peptide bond
XTALGRRKAEDRIKETLWADGVKIDEKDFEHIKSSHEDYFAVEYGKGSGYYDVNKKMDSEDTALCVGAVVTNMFHWWVDQNRENIEKFKKQDPENNGVMKFNGVKEATVDELNHFYKEYQSNKYADQSRFFDLIKKHFGNKALNPEELFELYFNGFYYNYSHRYIEDNKPAQNNLFSKVLENNKLLNPERSYGIDGFSNNVINALKSHKVLGLVHTTPLRYRHIISMWGADIDQDGKVKAIYVTDSDDREITFNDNSKRRIGMKRYDVLVDDNGNIRFTGKGATHKEEGAIYAGLYSLSRGDEVWEDYFKKYPEVQENL

SEQ ID NO: 286 - protein, 319 aa, synthetic construct
  VARIANT 1: note = M or absent or a signal peptide linked via a peptide bond
XTALGRRKAEDRIKETLWADGVKIDEKDFEHIKSSHEDYFAVEYGKGSGYYDVNKKMDSEDTALCVGAVVTNMFHWWVDQNRENIEKFKKQDPENNGVMKFNGVKEATVDELNHFYKEYQSNKYADQSRFFDLIKKHFGNKALNPEELFELYFNGFYYNSYHRYIEDNKPAQNNLFSKVLENNKLLNPERSYGIDGFSNNVINALKSHKVLGLVHTTPLRYRHIISMWGADIDQDGKVKAIYVTDSDDREITFNDNSKRRIGMKRYDVLVDDNGNIRFTGKGATHKEEGAIYAGLYSLSRGDEVWEDYFKKYPEVQENL

SEQ ID NO: 287 - protein, 319 aa, synthetic construct
  VARIANT 1: note = M or absent or a signal peptide linked via a peptide bond
XTALGRRKAEDRIKETLWADGVKIDEKDFEHIKSSHEDYFAVEYGKGSGYYDVNKKMDSEDTALCVGAVVTNMFHWWVDQNRENIEKFKKQDPENNGVMKFNGVKEATVDELNHFYKEYQSNKYADQSRFFDLIKKHFGNKALNPEELFELYFNGFYYNSSHRYIEDNKPAQNNLFSKVLENNKLLNPERSYGIDGFSNNVINALKSHKVLGLVYTTPLRYRHIISMWGADIDQDGKVKAIYVTDSDDREITFNDNSKRRIGMKRYDVLVDDNGNIRFTGKGATHKEEGAIYAGLYSLSRGDEVWEDYFKKYPEVQENL

SEQ ID NO: 288 - protein, 324 aa, synthetic construct
  VARIANT 1: note = M or absent or a signal peptide linked via a peptide bond
XTALGRRKAEDRIKETLWADGVKIDEKDFEHIKSSHEDYFAVEYGKGSGYYDVNKKMDSEDTALCVGAVVTNMFHWWVDQNRENIEKFKKQDPENNGVMKFNGVKEATVDELNHFYKEYQSNKYADQSRFFDLIKKHFPYLSTKHLGLNPEELFELYFNGFYYNSSHRYIEDNKPAQNNLFSKVLENNKLLNPERSYGIDGFSNNVINALKSHKVLGLVHTTPLRYRHIISMWGADIDQDGKVKAIYVTDSDDREITFNDNSKRRIGMKRYDVLVDDNGNIRFTGKGATHKEEGAIYAGLYSLSRGDEVWEDYFKKYPEVQENL

SEQ ID NO: 289 - protein, 319 aa, synthetic construct
  VARIANT 1: note = M or absent or a signal peptide linked via a peptide bond
XTALGRRKAEDRIKETLWADGVKIDEKDFEHIKSSHEDYFAVEYGKGSGYYDVNKKEDSEDTALCVGAVVTNMFHWWVDQNRENIEKFKKQDPENNGVMKFNGVKEATVDELNHFYKEYQSNKYADQSRFFDLIKKHFGNKALNPEELFELYFNGFYYNSSERYIEDNKPAQNNLFSKVLENNKLLNPERSYGIDGFSNNVINALKSHKVLGLVHTTPLRYRHIISMWGADIDQDGKVKAIYVTDSDDREITFNDNSKRRIGMKRYDVLVDDNGNIRFTGKGATHKERGAIYAGLYSLSRGDEVWEDYFKKYPEVQENL

SEQ ID NO: 290 - protein, 319 aa, synthetic construct
  VARIANT 1: note = M or absent or a signal peptide linked via a peptide bond
XTALGRRKAEDRIKETLWADGVKIDEKDFEHIKSSHEDYFAVEYGKGSGYYDVNKKMDSEDTALSVGAVVTNMFHWWVDQNRENIEKFKKQDPENNGVMKFNGVKEATVDELNHFYKEYQSNKYADQSRFFDLIKKHFGNKALNPEELFELYFNGFYYNSSHRYIEDNKPAQNNLFSKVLENNKLLNPERSYGIDGFSNNVINALKSHKVLGLVHTTPLRYRHIISMWGADIDQDGKVKAIYVTDSDDREITFNDNSKRRIGMIRYDVLVDDNGNIRFTGKGATHKEEGAIYAGLYSLSRGDEVWEDYFKKYPEVQENL

SEQ ID NO: 291 - protein, 319 aa, synthetic construct
  VARIANT 1: note = M or absent or a signal peptide linked via a peptide bond
XTALGRRKAEDRIKETLWADGVKIDEKDFEHIKSSHEDYFAVEYGKGSGYYDVNKKMDSEDTALSVGAVVTNMFHWWVDQNRENIEKFKKQDPENNGVMKFNGVKEATVDELNHFYKEYQSNKYADQSRFFDLIKKHFGNKALNPEELFELYFNGFYYNSSHRYIEDNKPAQNNLFSKVLENNKLLNPERSYGIDGFSNNVINALKSHKVLGLVHTTPLTYRHIISMWGADIDQDGKVKAIYVTDSDDREITFNDNSKRRIGMKRYDVLVDDNGNIRFTGKGATHKEEGAIYAGLYSLSRGDEVWEDYFKKYPEVQENL

SEQ ID NO: 292 - protein, 319 aa, synthetic construct
  VARIANT 1: note = M or absent or a signal peptide linked via a peptide bond
XTALGRRKAEDRIKETLWADGVKIDEKDFEHIKSSHEDYFAVEYGKGSGYYDVNKKMDSEDTALSVGAVVTNMFHWWVDQNRENIEKFKKQDPENNGVMKFEGVKEATVDELNHFYKEYQSNKYADQSRFFDLIKKHFGNKALNPEELFELYFNGFYYNSSHRYIEDNEPAQNNLFSKVLENNKLLNPERSYGIDGFSNNVINALKSHKVLGLVHTTPLRYRHIISMWGADIDQDGKVKAIYVTDSDDREITFNDNSKRRIGMKRYDVLVDDNGNIRFTGKGATHKEEGAIYAGLYSLSRGDEVWEDYFKKYPEVQENL

SEQ ID NO: 293 - protein, 319 aa, synthetic construct
  VARIANT 1: note = M or absent or a signal peptide linked via a peptide bond
XTALGRRKAEDRIKETLWADGVKIDEKDFEHIKSSHEDYFAVEYGKGSGYYDVNKKMDSEDTALSVGAVVTNMFHWWVDQNRENIEKFKKQDPENNGVMKFEGVKEATVDELNHFYKEYQSNKYADQSRFFDLIKKHFGNKALNPEELFELYFNGFYYNSSHRYIEDNEPAQNNLFSKVLENNKLLNPERSYGIDGFSNNVINALKSHKVLGLVHTTPLRYRHIISMWGADIDQDGKVKAIYVTDSDDREITFNDNSKRRIGMIRYDVLVDDNGNIRFTGKGATHKEEGAIYAGLYSLSRGDEVWEDYFKKYPEVQENL

SEQ ID NO: 294 - protein, 319 aa, synthetic construct
  VARIANT 1: note = M or absent or a signal peptide linked via a peptide bond
XTALGRRKAEDRIKETLWADGVKIDEKDFEHIKSSHEDYFAVEYGKGSGYYDVNKKMDSEDTALSVGAVVTNMFHWWVDQNRENIEKFKKQDPENNGVMKFEGVKEATVDELNHFYKEYQSNKYADQSRFFDLIKKHFGNKALNPEELFELYFNGFYYNSSHRYIEDNEPAQNNLFSKVLENNKLLNPERSYGIDGFSNNVINALKSHKVLGLVHTTPLTYRHIISMWGADIDQDGKVKAIYVTDSDDREITFNDNSKRRIGMIRYDVLVDDNGNIRFTGKGATHKEEGAIYAGLYSLSRGDEVWEDYFKKYPEVQENL

SEQ ID NO: 295 - protein, 317 aa, synthetic construct
  VARIANT 1: note = M or absent or a signal peptide linked via a peptide bond
XTALGRRKAEDRIKETLWADGVKIDEKDFEHIKSSHEDYFAVEYGKGSGYYDVNKKMDSEDTALCVGAVVTNMFHWWVDQNRENIEKFKKQDPENNGVMKFEGVKEATVDELNHFYESDHGYADQSRFFDLIKKHFGNKALNPEELFELYFNGFYYNSSHRYIEDNEPAQNNLFSKVLENNKLLNPERSYGIDGFSNNVINALKSHKVLGLVHTTPLRYRHIISMWGADIDQDGKVKAIYVTDSDDREITFNDNSKRRIGMIRYDVLVDDNGNIRFTGKGATHKEEGAIYAGLYSLSRGDEVWEDYFKKYPEVQENL

SEQ ID NO: 296 - protein, 317 aa, synthetic construct
  VARIANT 1: note = M or absent or a signal peptide linked via a peptide bond
XTALGRRKAEDRIKETLWADGVKIDEKDFEHIKSSHEDYFAVEYGKGSGYYDVNKKMDSEDTALCVGAVVTNMFHWWVDQNRENIEKFKKQDPENNGVMKFEGVKEATVDELNHFYHSNDNYADQSRFFDLIKKHFGNKALNPEELFELYFNGFYYNSSHRYIEDNEPAQNNLFSKVLENNKLLNPERSYGIDGFSNNVINALKSHKVLGLVHTTPLRYRHIISMWGADIDQDGKVKAIYVTDSDDREITFNDNSKRRIGMIRYDVLVDDNGNIRFTGKGATHKEEGAIYAGLYSLSRGDEVWEDYFKKYPEVQENL

SEQ ID NO: 297 - protein, 316 aa, synthetic construct
  VARIANT 1: note = M or absent or a signal peptide linked via a peptide bond
XTALGRRKAEDRIKETLWADGVKIDEKDFEHIKSSHEDYFAVEYGKGSGYYDVNKKMDSEDTALCVGAVVTNMFHWWVDQNRENIEKFKKQDPENNGVMKFEGVKEATVDELNHFYRDNRDNYADQSRFFDLIKKHFGNKALNPEELFELYFNGFYYNSSHRYIEDNEPAQNNLFSKVLENNKLLNPERSYGIDGFSNNVINALKSHKVLGLVHTTPLRYRHIISMWGADIDQDGKVKAIYVTDSDDREITTNNNKRIGMIRYDVLVDDNGNIRFTGKGATHKEEGAIYAGLYSLSRGDEVWEDYFKKYPEVQENL

SEQ ID NO: 298 - protein, 315 aa, synthetic construct
  VARIANT 1: note = M or absent or a signal peptide linked via a peptide bond
XTALGRRKAEDRIKETLWADGVKIDEKDFEHIKSSHEDYFAVEYGKGSGYYDVNKKMDSEDTALCVGAVVTNMFHWWVDQNRENIEKFKKQDPENNGVMKFEGVKEATVDELNHFYRDNRDNYADQSRFFDLIKKHFGNKALNPEELFELYFNGFYYNSSHRYIEDNEPAQNNLFSKVLENNKLLNPERSYGIDGFSNNVINALKSHKVLGLVHTTPLRYRHIISMWGADIDQDGKVKAIYVTDSDDREITIGDERIGMIRYDVLVDDNGNIRFTGKGATHKEEGAIYAGLYSLSRGDEVWEDYFKKYPEVQENL

SEQ ID NO: 299 - protein, 315 aa, synthetic construct
  VARIANT 1: note = M or absent or a signal peptide linked via a peptide bond
XTALGRRKAEDRIKETLWADGVKIDEKDFEHIKSSHEDYFAVEYGKGSGYYDVNKKMDSEDTALCVGAVVTNMFHWWVDQNRENIEKFKKQDPENNGVMKFEGVKEATVDELNHFYRDNRDNYADQSRFFDLIKKHFGNKALNPEELFELYFNGFYYNSSHRYIEDNEPAQNNLFSKVLENNKLLNPERSYGIDGFSNNVINALKSHKVLGLVHTTPLRYRHIISMWGADIDQDGKVKAIYVTDSDDREITIGDRRIGMIRYDVLVDDNGNIRFTGKGATHKEEGAIYAGLYSLSRGDEVWEDYFKKYPEVQENL

SEQ ID NO: 300 - protein, 318 aa, synthetic construct
  VARIANT 1: note = M or absent or a signal peptide linked via a peptide bond
XTALGRRKAEDRIKETLWADGVKIDEKDFEHIKSSHEDYFAVEYGKGSGYYDVNKKMDSEDTALCVGAVVTNMFHWWVDQNRENIEKFKKQDPENNGVMKFEGVKEATVDELNHFYRDNRDNYADQSRFFDLIKKHFGNKALNPEELFELYFNGFYYNSSHRYIEDNEPAQNNLFSKVLENNKLLNPERSYGIDGFSNNVINALKSHKVLGLVHTTPLRYRHIISMWGADIGEDGRVKAIYVTDSDDREITFNDNSKRRIGMIRYDVLVDDNGNIRFTGKGATHKEEGAIYAGLYSLSRGDEVWEDYFKKYPEVQENL

SEQ ID NO: 301 - protein, 318 aa, synthetic construct
  VARIANT 1: note = M or absent or a signal peptide linked via a peptide bond
XTALGRRKAEDRIKETLWADGVKIDEKDFEHIKSSHEDYFAVEYGKGSGYYDVNKKMDSEDTALCVGAVVTNMFHWWVDQNRENIEKFKKQDPENNGVMKFEGVKEATVDELNHFYRDNRDNYADQSRFFDLIKKHFGNKALNPEELFELYFNGFYYNSSHRYIEDNEPAQNNLFSKVLENNKLLNPERSYGIDGFSNNVINALKSHKVLGLVHTTPLRYRHIISMWGADIDEKGKVKAIYVTDSDDREITFNDNSKRRIGMIRYDVLVDDNGNIRFTGKGATHKEEGAIYAGLYSLSRGDEVWEDYFKKYPEVQENL

SEQ ID NO: 302 - protein, 318 aa, synthetic construct
  VARIANT 1: note = M or absent or a signal peptide linked via a peptide bond
XTALGRRKAEDRIKETLWADGVKIDEKDFEHIKSSHEDYFAVEYGKGSGYYDVNKKMDSEDTALCVGAVVTNMFHWWVDQNRENIEKFKKQDPENNGVMKFEGVKEATVDELNHFYRDNRDNYADQSRFFDLIKKHFGNKALNPEELFELYFNGFYYNSSHRYIEDNEPAQNNLFSKVLENNKLLNPERSYGIDGFSNNVINALKSHKVLGLVHTTPLRYRHIISMWGADIDENGNVKAIYVTDSDDREITFNDNSKRRIGMIRYDVLVDDNGNIRFTGKGATHKEEGAIYAGLYSLSRGDEVWEDYFKKYPEVQENL

SEQ ID NO: 303 - protein, 315 aa, synthetic construct
  VARIANT 1: note = M or absent or a signal peptide linked via a peptide bond
XTALGRRKAEDRIKETLWADGVKIDEKDFEHIKSSHEDYFAVEYGKGSGYYDVNKKMDSEDTALCVGAVVTNMFHWWVDQNRENIEKFKKQDPENNGVMKFEGVKEATVDELNHFYESPNTDQSRFFDLIKKHFGNKALNPEELFELYFNGFYYNSSHRYIEDNEPAQNNLFSKVLENNKLLNPERSYGIDGFSNNVINALKSHKVLGLVHTTPLRYRHIISMWGADIDQDGKVKAIYVTDSDDREITFNDNSKRRIGMIRYDVLVDDNGNIRFTGKGATHKEEGAIYAGLYSLSRGDEVWEDYFKKYPEVQENL

SEQ ID NO: 304 - protein, 315 aa, synthetic construct
  VARIANT 1: note = M or absent or a signal peptide linked via a peptide bond
XTALGRRKAEDRIKETLWADGVKIDEKDFEHIKSSHEDYFAVEYGKGSGYYDVNKKMDSEDTALCVGAVVTNMFHWWVDQNRENIEKFKKQDPENNGVMKFEGVKEATVDELNHFYKSEGYDQSRFFDLIKKHFGNKALNPEELFELYFNGFYYNSSHRYIEDNEPAQNNLFSKVLENNKLLNPERSYGIDGFSNNVINALKSHKVLGLVHTTPLRYRHIISMWGADIDQDGKVKAIYVTDSDDREITFNDNSKRRIGMIRYDVLVDDNGNIRFTGKGATHKEEGAIYAGLYSLSRGDEVWEDYFKKYPEVQENL

SEQ ID NO: 305 - protein, 314 aa, synthetic construct
  VARIANT 1: note = M or absent or a signal peptide linked via a peptide bond
XTALGRRKAEDRIKETLWADGVKIDEKDFEHIKSSHEDYFAVEYGKGSGYYDVNKKMDSEDTALCVGAVVTNMFHWWVDQNRENIEKFKKQDPENNGVMKFEGVKEATVDELNHFYRDNRDNYADQSRFFDLIKKHFGNKALNPEELFELYFNGFYYNSSHRYIEDNEPAQNNLFSKVLENNKLLNPERSYGIDGFSNNVINALKSHKVLGLVHTTPLRYRHIISMWGADIDQDGKVKAIYVTDSDDREITFGRRIGMIRYDVLVDDNGNIRFTGKGATHKEEGAIYAGLYSLSRGDEVWEDYFKKYPEVQENL

SEQ ID NO: 306 - protein, 314 aa, synthetic construct
  VARIANT 1: note = M or absent or a signal peptide linked via a peptide bond
XTALGRRKAEDRIKETLWADGVKIDEKDFEHIKSSHEDYFAVEYGKGSGYYDVNKKMDSEDTALCVGAVVTNMFHWWVDQNRENIEKFKKQDPENNGVMKFEGVKEATVDELNHFYRDNRDNYADQSRFFDLIKKHFGNKALNPEELFELYFNGFYYNSSHRYIEDNEPAQNNLFSKVLENNKLLNPERSYGIDGFSNNVINALKSHKVLGLVHTTPLRYRHIISMWGADIDQDGKVKAIYVTDSDDREITFKRRIGMIRYDVLVDDNGNIRFTGKGATHKEEGAIYAGLYSLSRGDEVWEDYFKKYPEVQENL

SEQ ID NO: 307 - protein, 319 aa, synthetic construct
  VARIANT 1: note = M or absent or a signal peptide linked via a peptide bond
XTALGRRKAEDRIKETLWADGVKIDEKDFEHIKSSHEDYFAVEYGKGSGYYDVNKKMDSEDTALCVGAVVTNMFHWWVDQNRENIEKFKKQDPENNGVMKFNGVKEATVDELNHFYKEYQSNKYADQSRFFDLIKKHFPNKALNPEELFELYFNGFYYNSSHRYIEDNKPAQNNLFSKVLENNKLLNPERSYGIDGFSNNVINALKSHKVLGLVHTTPLRYRHIISMWGADIDQDGKVKAIYVTDSDDREITFNDNSKRRIGMIRYDVLVDDNGNIRFTGKGATHKEEGAIYAGLYSLSRGDEVWEDYFKKYPEVQENL

SEQ ID NO: 308 - protein, 319 aa, synthetic construct
  VARIANT 1: note = M or absent or a signal peptide linked via a peptide bond
XTALGRRKAEDRIKETLWADGVKIDEKDFEHIKSSHEDYFAVEYGKGSGYYDVNKKMDSEDTALCVGAVVTNMFHWWVDQNRENIEKFKKQDPENNGVMKFNGVKEATVDELNEFYKEYQSNKYADQSRFFDLIKKHFGNKALNPEELFELYFNGFYYNSSHRYIEDNKPAQNNLFSKVLENNKLLNPERSYGIDGFSNNVINALKSHKVLGLVHTTPLRYRHIISMWGADIDQDGKVKAIYVTDSDDREITFNDNSKRRIGMIRYDVLVDDNGNIRFTGKGATHKEEGAIYAGLYSLSRGDEVWEDYFKKYPEVQENL

SEQ ID NO: 309 - protein, 319 aa, synthetic construct
  VARIANT 1: note = M or absent or a signal peptide linked via a peptide bond
XTALGRRKAEDRIKETLWADGVKIDEKDFEHIKSSHEDYFAVEYGKGSGYYDVNKKMDSEDTALCVGAVVTNMFHWWVDQNRENIEKFKKQDPENNGVMKFNGVKEATVDELNHFYKEYQSNKYADQSRFFDLIKKHFGNKALNPEELFELYFNGFYYNSSHRYIEDNKPAQNNLFSKVLENNKLLNPERSYGIDGFSNNVKNALKSHKVLGLVHTTPLRYRHIISMWGADIDQDGKVKAIYVTDSDDREITFNDNSKRRIGMIRYDVLVDDNGNIRFTGKGATHKEEGAIYAGLYSLSRGDEVWEDYFKKYPEVQENL

SEQ ID NO: 310 - protein, 319 aa, synthetic construct
  VARIANT 1: note = M or absent or a signal peptide linked via a peptide bond
XTALGRRKAEDRIKETLWADGVKIDEKDFEHIKSSHEDYFAVEYGKGSGYYDVNKKMDSEDTALCVGAVVTNMFHWWVDQNRENIEKFKKQDPENNGVMKFNGVKEATVDELNHFYKEYQSNKYADQSRFFDLIKKHFGNKALNPEELFELYFNGFYYNSSHRYIEDNKPAQNNLFSKVLENNKLLNPERSYGIDGFSNNVINALKSHKVLGLVHTTPLRYRHIISMWGADIDQDGKVKAIYVTDSDDREITFNDNSKRRIGMIRYDVLVDDNGNARFTGKGATHKEEGAIYAGLYSLSRGDEVWEDYFKKYPEVQENL

SEQ ID NO: 311 - protein, 319 aa, synthetic construct
  VARIANT 1: note = M or absent or a signal peptide linked via a peptide bond
XTALGRRKAEDRIKETLWADGVKIDEKDFEHIKSSHEDYFAVEYGKGSGYYDVNKDMDSEDTALCVGAVVTNMFHWWVDQNRENIEKFKKQDPENNGVMKFNGVKEATVDELNHFYKEYQSNKYADQSRFFDLIKKHFGNKALNPEELFELYFNGFYYNSSHRYIEDNKPAQNNLFSKVLENNKLLNPERSYGIDGFSNNVINALKSHKVLGLVHTTPLRYRHIISMWGADIDQDGKVKAIYVTDSDDREITFNDNSKRRIGMIRYDVLVDDNGNIRFTGKGATHKEEGAIYAGLYSLSRGDEVWEDYFKKYPEVQENL

SEQ ID NO: 312 - protein, 319 aa, synthetic construct
  VARIANT 1: note = M or absent or a signal peptide linked via a peptide bond
XTALGRRKAEDRIKETLWADGVKIDEKDFEHIKSSHEDYFAVEYGKGSGYYDVNKKMDSEDTALCVGAVVTNMFHWWVDQNRENIEKFLKQDPENNGVMKFNGVKEATVDELNHFYKEYQSNKYADQSRFFDLIKKHFGNKALNPEELFELYFNGFYYNSSHRYIEDNKPAQNNLFSKVLENNKLLNPERSYGIDGFSNNVINALKSHKVLGLVHTTPLRYRHIISMWGADIDQDGKVKAIYVTDSDDREITFNDNSKRRIGMIRYDVLVDDNGNIRFTGKGATHKEEGAIYAGLYSLSRGDEVWEDYFKKYPEVQENL

SEQ ID NO: 313 - protein, 319 aa, synthetic construct
  VARIANT 1: note = M or absent or a signal peptide linked via a peptide bond
XTALGRRKAEDRIKETLWADGVKIDEKDFEHIKSSHEDYFAVEYGKGSGYYDVNKKMDSEDTALCVGAVVTNMFHWWVDQNRENIEKFKKQDPENNGVMKFNGVKEATVDELNHFYKEYQSDKYADQSRFFDLIKKHFGNKALNPEELFELYFNGFYYNSSHRYIEDNKPAQNNLFSKVLENNKLLNPERSYGIDGFSNNVINALKSHKVLGLVHTTPLRYRHIISMWGADIDQDGKVKAIYVTDSDDREITFNDNSKRRIGMIRYDVLVDDNGNIRFTGKGATHKEEGAIYAGLYSLSRGDEVWEDYFKKYPEVQENL

SEQ ID NO: 314 - protein, 319 aa, synthetic construct
  VARIANT 1: note = M or absent or a signal peptide linked via a peptide bond
XTALGRRKAEDRIKETLWADGVKIDEKDFEHIKESHEDYFAVEYGKGSGYYDVNKKMDSEDTALCVGAVVTNMFHWWVDQNRENIEKFKKQDPENNGVMKFNGVKEATVDELNHFYKEYQSNKYADQSRFFDLIKKHFGNKALNPEELFELYFNGFYYNSSHRYIEDNKPAQNNLFSKVLENNKLLNPERSYGIDGFSNNVINALKSHKVLGLVHTTPLRYRHIISMWGADIDQDGKVKAIYVTDSDDREITFNDNSKRRIGMIRYDVLVDDNGNIRFTGKGATHKEEGAIYAGLYSLSRGDEVWEDYFKKYPEVQENL

SEQ ID NO: 315 - protein, 319 aa, synthetic construct
  VARIANT 1: note = M or absent or a signal peptide linked via a peptide bond
XTALGRRKAEDRIKETLWADGVKIDEKDFEHIKSSHEDYFAVEYGKGSGYYDVNKKMDSEDTALCVGAVVTNMFHWWVDQNRENIEKFKKQDPENNGVMKFNGVKEATVDELNHFYKEYQSNKYADQSRFFDLIKKHFGNKALNPEELFELYFNGFYYNSSHRYIEDNKPAQNNLFSKVLENNKLLNPERSYGIDGFSNNVINALKSHKVLGLVHGTPLRYRHIISMWGADIDQDGKVKAIYVTDSDDREITFNDNSKRRIGMIRYDVLVDDNGNIRFTGKGATHKEEGAIYAGLYSLSRGDEVWEDYFKKYPEVQENL

SEQ ID NO: 316 - protein, 319 aa, synthetic construct
  VARIANT 1: note = M or absent or a signal peptide linked via a peptide bond
XTALGRRKAEDRIKETLWADGVKIDEKDFEHIKSSHEDYFAVEYGKGSGYYDVNKKMDSEDTALCVGAVVTNMFHWWVDQNRENIEKFKKQDPENNGVMKFNGVKEATVDELNHFYKEYQSNKYADQSRFFDLIKKHFGNKALNPEELFELYFNGFYYNSSHRYIEDNKPAQNNLFSKVLENNKLLNPERSYGIDGFSNNVINALKSHKPLGLVHTTPLRYRHIISMWGADIDQDGKVKAIYVTDSDDREITFNDNSKRRIGMIRYDVLVDDNGNIRFTGKGATHKEEGAIYAGLYSLSRGDEVWEDYFKKYPEVQENL

SEQ ID NO: 317 - protein, 319 aa, synthetic construct
  VARIANT 1: note = M or absent or a signal peptide linked via a peptide bond
XTALGRRKAEDRIKETLWADGVKIDEKDFEHIKSSHEDYFAVEYGKGSGYYDVNKKMDSEDTALCVGAVVTNMFHWWVDQNRENIEKFKKQDPENNGVMKFNGVKEATVDELNHFYKEYQSNKYADQSRFFDLIKKHFGNKALNPEELFELYFNGFYYNSSHRYIEDNKPAQNNLFSKVLENNKLLNPERSYGIDGFSNNVINALKSHKVLGLGHTTPLRYRHIISMWGADIDQDGKVKAIYVTDSDDREITFNDNSKRRIGMIRYDVLVDDNGNIRFTGKGATHKEEGAIYAGLYSLSRGDEVWEDYFKKYPEVQENL

SEQ ID NO: 318 - protein, 319 aa, synthetic construct
  VARIANT 1: note = M or absent or a signal peptide linked via a peptide bond
XTALGRRKAEDRIKETLWADGVKIDEKDFEHIKSSHEDYFAVEYGKGSGYYDVNKKMDSEDTALCVGAVVTNMFHWWVDQNRENIEKFKKQDPENNGVMKFNGVKEATVDELNHFYKEYQSNKYADQSRFFDLIKKHFGNKALNPEELFELYFNGFYYNSSHRYIEDNKPAQNNLFSKVLENNKLLNPERSYGIDGFSNNVINALKSHKVLGLVHTTPLRYRHIISMWGADIDQDGKVKAIYITDSDDREITFNDNSKRRIGMIRYDVLVDDNGNIRFTGKGATHKEEGAIYAGLYSLSRGDEVWEDYFKKYPEVQENL

SEQ ID NO: 319 - protein, 319 aa, synthetic construct
  VARIANT 1: note = M or absent or a signal peptide linked via a peptide bond
XTALGRRKAEDRIKETLWADGVKIDEKDFEHIKSSHEDYFAVEYGKGSGYYDVNKKMDSEDTALCVGAVVTNMFHWWVDQNRENIEKFKKQDPENNGVMKFNGVKEATVDELNHFYKEYQSNKYADQSRFFDLIKKHFGNKALNPEELFELYFNGFYYNSSHRYIEDNKPAQNNLFSKVLENNKLLNPERSYGIDGFSNNVINALKSHKVLGLVHTTPLRYRHIISMWGADIDQDGKVKAIYVTDSDDREITFNDNSKRRIGMIRYDVLVDDNGNIRFTGKGATHKEEGAIYAGLYSLSRGDEEWEDYFKKYPEVQENL

SEQ ID NO: 320 - protein, 319 aa, synthetic construct
  VARIANT 1: note = M or absent or a signal peptide linked via a peptide bond
XTALGRRKAEDRIKETLWADGVKIDEKDFEHIKSSHEDYFAVEYGKGSGYYDVNKKMDSEDTALCVGAVVTNMFHWWVDQNRENIEKFKKQDPENNGVMKFNGVKEATVDELNHFYKEYQSNKYADQSRFFDLIKKHFGNKALNPEELFELYFNGFYYNSSHRTIEDNKPAQNNLFSKVLENNKLLNPERSYGIDGFSNNVINALKSHKVLGLVHTTPLRYRHIISMWGADIDQDGKVKAIYVTDSDDREITFNDNSKRRIGMIRYDVLVDDNGNIRFTGKGATHKEEGAIYAGLYSLSRGDEVWEDYFKKYPEVQENL

SEQ ID NO: 321 - protein, 319 aa, synthetic construct
  VARIANT 1: note = M or absent or a signal peptide linked via a peptide bond
XTALGRRKAEDRIKETLWADGVKIDEKDFEHIKSSHEDYFAVEYGKGSGYYDVNKKMDSEDTALCVGAVVTNMFHWWVDQNRENIEKFKKQDPENNGVMKFNGVKEATVDELNHFYKEYQSNKYADQSRFFDLIKKHFGNKALNPEELFELYFNGFYYNSSHRYIEDNKPAQNNLFSKVLENNKLLNPERSYGIDGFSNNVINALKSHKVLGLVHTTPLRTRHIISMWGADIDQDGKVKAIYVTDSDDREITFNDNSKRRIGMIRYDVLVDDNGNIRFTGKGATHKEEGAIYAGLYSLSRGDEVWEDYFKKYPEVQENL

SEQ ID NO: 322 - protein, 319 aa, synthetic construct
  VARIANT 1: note = M or absent or a signal peptide linked via a peptide bond
XTALGRRKAEDRIKETLWADGVKPDEKDFEHIKSSHEDYFAVEYGKGSGYYDVNKKMDSEDTALCVGAVVTNMFHWWVDQNRENIEKFKKQDPENNGVMKFNGVKEATVDELNHFYKEYQSNKYADQSRFFDLIKKHFGNKALNPEELFELYFNGFYYNSSHRYIEDNKPAQNNLFSKVLENNKLLNPERSYGIDGFSNNVINALKSHKVLGLVHTTPLRYRHIISMWGADIDQDGKVKAIYVTDSDDREITFNDNSKRRIGMIRYDVLVDDNGNIRFTGKGATHKEEGAIYAGLYSLSRGDEVWEDYFKKYPEVQENL

SEQ ID NO: 323 - protein, 319 aa, synthetic construct
  VARIANT 1: note = M or absent or a signal peptide linked via a peptide bond
XTALGRRKAEDRIKETLWADGVKGDEKDFEHIKSSHEDYFAVEYGKGSGYYDVNKKMDSEDTALCVGAVVTNMFHWWVDQNRENIEKFKKQDPENNGVMKFNGVKEATVDELNHFYKEYQSNKYADQSRFFDLIKKHFGNKALNPEELFELYFNGFYYNSSHRYIEDNKPAQNNLFSKVLENNKLLNPERSYGIDGFSNNVINALKSHKVLGLVHTTPLRYRHIISMWGADIDQDGKVKAIYVTDSDDREITFNDNSKRRIGMIRYDVLVDDNGNIRFTGKGATHKEEGAIYAGLYSLSRGDEVWEDYFKKYPEVQENL

SEQ ID NO: 324 - protein, 319 aa, synthetic construct
  VARIANT 1: note = M or absent or a signal peptide linked via a peptide bond
XTALGRRKAEDRIKETLWADGVKIDEKDFEHIKSSHEDYFALEYGKGSGYYDVNKKMDSEDTALCVGAVVTNMFHWWVDQNRENIEKFKKQDPENNGVMKFNGVKEATVDELNHFYKEYQSNKYADQSRFFDLIKKHFGNKALNPEELFELYFNGFYYNSSHRYIEDNKPAQNNLFSKVLENNKLLNPERSYGIDGFSNNVINALKSHKVLGLVHTTPLRYRHIISMWGADIDQDGKVKAIYVTDSDDREITFNDNSKRRIGMIRYDVLVDDNGNIRFTGKGATHKEEGAIYAGLYSLSRGDEVWEDYFKKYPEVQENL

SEQ ID NO: 325 - protein, 319 aa, synthetic construct
  VARIANT 1: note = M or absent or a signal peptide linked via a peptide bond
XTALGRRKAEDRIKETLWADGVKIDEKDFEHIKSSHEDYFAVEYGKGSGYYDVNKKMDSEDTALCVGAVVTNMFHWWVDQNRENIEKFKKQDPENNGVMKFNGVKEATVDELNHFYKEYQSNKYTDQSRFFDLIKKHFGNKALNPEELFELYFNGFYYNSSHRYIEDNKPAQNNLFSKVLENNKLLNPERSYGIDGFSNNVINALKSHKVLGLVHTTPLRYRHIISMWGADIDQDGKVKAIYVTDSDDREITFNDNSKRRIGMIRYDVLVDDNGNIRFTGKGATHKEEGAIYAGLYSLSRGDEVWEDYFKKYPEVQENL

SEQ ID NO: 326 - protein, 319 aa, synthetic construct
  VARIANT 1: note = M or absent or a signal peptide linked via a peptide bond
XTALGRRKAEDRIKETLWADGVKIDEKDFEHIKSSHEDYFAVEYGKGSGYYDVNKKMDSEDTALCVGAVVTNMFHWWVDQNRENIEKFKKQDPENNGVMKFNGVKEATVDELNHFYKEYQSPKYADQSRFFDLIKKHFGNKALNPEELFELYFNGFYYNSSHRYIEDNKPAQNNLFSKVLENNKLLNPERSYGIDGFSNNVINALKSHKVLGLVHTTPLRYRHIISMWGADIDQDGKVKAIYVTDSDDREITFNDNSKRRIGMIRYDVLVDDNGNIRFTGKGATHKEEGAIYAGLYSLSRGDEVWEDYFKKYPEVQENL

SEQ ID NO: 327 - protein, 319 aa, synthetic construct
  VARIANT 1: note = M or absent or a signal peptide linked via a peptide bond
XTALGRRKAEDRIKETLWADGVKIDEKDFEHIKSSHEDYFAVEYGKGSGYYDVNKKMDSEDTALCVGAVVTNMFHWWVDQNRENIEKFKKQDPENNGVMKFNGVKEATVDELNHFYKEYQSNKYADQSRFFDLIKKHFGNKALNPEELFELYFNGFYYNSSHRYIEDNKPAQNNLFSKVLEGNKLLNPERSYGIDGFSNNVINALKSHKVLGLVHTTPLRYRHIISMWGADIDQDGKVKAIYVTDSDDREITFNDNSKRRIGMIRYDVLVDDNGNIRFTGKGATHKEEGAIYAGLYSLSRGDEVWEDYFKKYPEVQENL

SEQ ID NO: 328 - protein, 319 aa, synthetic construct
  VARIANT 1: note = M or absent or a signal peptide linked via a peptide bond
XTALGRRKAEDRIKETLWADGVKIDEKDFEHIKSSHEDYFAVEYGKGSGYYDVNKKMDSEDTALCVGAVVTNMFHWWVDQNRENIEKFKKQDPENNGVMKFNGVKEATVDELNHFYKEYQSNKYADQSRFFDLIKKHFGNKALNPEELFELYFNGFYYNSSHRYIEDNKPAQNNLFSKVLENNKLLNPERSYGIDGFSNNVINALKSHKVLGLVHTTPLRYRHIISMWGADIDQDGKVKALYVTDSDDREITFNDNSKRRIGMIRYDVLVDDNGNIRFTGKGATHKEEGAIYAGLYSLSRGDEVWEDYFKKYPEVQENL

SEQ ID NO: 329 - protein, 319 aa, synthetic construct
  VARIANT 1: note = M or absent or a signal peptide linked via a peptide bond
XTALGRRKAEDRIKETLWADGVKIDEKDFEHIKSSHEDYFAVEYGKGSGYYDVNKKMDSEDTALCVGAVVTNMFHWWVDQNRENIEKFKKQDPENNGVMKFNGVKEATVDELNHFYKEYQSNKYADQSRFFDLIKKHFGNKALNPEELFELYFNGFYYNSSHRYIEDNKPAQNNLFSKVLENNKLLNPERSYGIDGFSNNVINALKSHKVLGLVHTTPLRYRHIISMWGADIDQDGKVKAIYYTDSDDREITFNDNSKRRIGMIRYDVLVDDNGNIRFTGKGATHKEEGAIYAGLYSLSRGDEVWEDYFKKYPEVQENL

SEQ ID NO: 330 - protein, 319 aa, synthetic construct
  VARIANT 1: note = M or absent or a signal peptide linked via a peptide bond
XTALGRRKAEDRIKETLWADGVKIDEKDFEHIKSSHEDYFAVEYGKGSGYYDVNKKMDSEDTALCVGAVVTNMFHWWVDQNRENIEKFKKQDPENNGVMKFNGVKEATVDELNHFYKEYQSNKYADQSRFFDLIKKHFGNKALNPEELFELYFNGFYYNSSHRYIEDNKPAQNNLFSKVLENNKLLNPERSYGIDGFSNNVINALKSHKVLGLVHTTPLRYRHIISMWGADIDQDGKVKAIYVTDSDDRDITFNDNSKRRIGMIRYDVLVDDNGNIRFTGKGATHKEEGAIYAGLYSLSRGDEVWEDYFKKYPEVQENL

SEQ ID NO: 331 - protein, 319 aa, synthetic construct
  VARIANT 1: note = M or absent or a signal peptide linked via a peptide bond
XTALGRRKAEDRIKETLWADGVKIDEKDFEHIKSSHEDYFAVEYGKGSGYYDVNKKMDSEDTALCVGAVVTNMFHWWVDQNRENIEKFKKQDPENNGVMKFNGVKEATVDELNDFYKEYQSNKYADQSRFFDLIKKHFGNKALNPEELFELYFNGFYYNSSHRYIEDNKPAQNNLFSKVLENNKLLNPERSYGIDGFSNNVINALKSHKVLGLVHTTPLRYRHIISMWGADIDQDGKVKAIYVTDSDDREITFNDNSKRRIGMIRYDVLVDDNGNIRFTGKGATHKEEGAIYAGLYSLSRGDEVWEDYFKKYPEVQENL

SEQ ID NO: 332 - protein, 319 aa, synthetic construct
  VARIANT 1: note = M or absent or a signal peptide linked via a peptide bond
XTALGRRKAEDRIKETLWADGVKIDEKDFEHIKSSHEDYFAVEYGKGSGYYDVNKKMDSEDTALCVGAVVTNMFHWWVDQNRENIEKFKKQDPENNGVMKFNGVKEATVDELKHFYKEYQSNKYADQSRFFDLIKKHFGNKALNPEELFELYFNGFYYNSSHRYIEDNKPAQNNLFSKVLENNKLLNPERSYGIDGFSNNVINALKSHKVLGLVHTTPLRYRHIISMWGADIDQDGKVKAIYVTDSDDREITFNDNSKRRIGMIRYDVLVDDNGNIRFTGKGATHKEEGAIYAGLYSLSRGDEVWEDYFKKYPEVQENL

SEQ ID NO: 333 - protein, 319 aa, synthetic construct
  VARIANT 1: note = M or absent or a signal peptide linked via a peptide bond
XTALGRRKAEDRIKETLWADGVKIDEKDFEHIKSSHEDYFAVEYGKGSGYYDVNKKMDSEDTALCVGAVVTNMFHWWVDQNRENIEKFKKQDPENNGVMKFNGVKEATVDELNHFYKEYQSNKYADQSRFFDLIKQHFGNKALNPEELFELYFNGFYYNSSHRYIEDNKPAQNNLFSKVLENNKLLNPERSYGIDGFSNNVINALKSHKVLGLVHTTPLRYRHIISMWGADIDQDGKVKAIYVTDSDDREITFNDNSKRRIGMIRYDVLVDDNGNIRFTGKGATHKEEGAIYAGLYSLSRGDEVWEDYFKKYPEVQENL

SEQ ID NO: 334 - protein, 319 aa, synthetic construct
  VARIANT 1: note = M or absent or a signal peptide linked via a peptide bond
XTALGRRKAEDRIKETLWADGVKIDEKDFEHIKSSHEDYFAVEYGKGSGYYDVNKKMDSEDTALCVGAVVTNMFHWWVDQNRENIEKFKKQDPENNGVMKFNGVKEATVDELNHFYKEYQSNKYADQSRFFDLIKLHFGNKALNPEELFELYFNGFYYNSSHRYIEDNKPAQNNLFSKVLENNKLLNPERSYGIDGFSNNVINALKSHKVLGLVHTTPLRYRHIISMWGADIDQDGKVKAIYVTDSDDREITFNDNSKRRIGMIRYDVLVDDNGNIRFTGKGATHKEEGAIYAGLYSLSRGDEVWEDYFKKYPEVQENL

SEQ ID NO: 335 - protein, 319 aa, synthetic construct
  VARIANT 1: note = M or absent or a signal peptide linked via a peptide bond
XTALGRRKAEDRIKETLWADGVKIDEKDFEHIKSSHEDYFAVEYGKGSGYYDVNKKMDSEDTALCVGAVVTNMFHWWVDQNRENIEKFKKQDPENNGVMKFNGVKEATVDELNHFYKEYQSNKYADQSRFFDLILKHFGNKALNPEELFELYFNGFYYNSSHRYIEDNKPAQNNLFSKVLENNKLLNPERSYGIDGFSNNVINALKSHKVLGLVHTTPLRYRHIISMWGADIDQDGKVKAIYVTDSDDREITFNDNSKRRIGMIRYDVLVDDNGNIRFTGKGATHKEEGAIYAGLYSLSRGDEVWEDYFKKYPEVQENL

SEQ ID NO: 336 - protein, 319 aa, synthetic construct
  VARIANT 1: note = M or absent or a signal peptide linked via a peptide bond
XTALGRRKAEDRIKETLWADGVKIDEKDFEHIKSSHEDYFAVEYGKGSGYYDVNKKMDSEDTALCVGAVVTNMFHWWVDQNRENIEKFKKQDPENNGVMKFNGVKEATVDELNHFYKEYQSNKYADQSRFFDLIRKHFGNKALNPEELFELYFNGFYYNSSHRYIEDNKPAQNNLFSKVLENNKLLNPERSYGIDGFSNNVINALKSHKVLGLVHTTPLRYRHIISMWGADIDQDGKVKAIYVTDSDDREITFNDNSKRRIGMIRYDVLVDDNGNIRFTGKGATHKEEGAIYAGLYSLSRGDEVWEDYFKKYPEVQENL

SEQ ID NO: 337 - protein, 319 aa, synthetic construct
  VARIANT 1: note = M or absent or a signal peptide linked via a peptide bond
XTALGRRKAEDRIKETLWADGVKIDEKDFEHIKSSHEDYFAVEYGKGSGYYDVNKKMDSEDTALCVGAVVTNMFHWWVDQNRENIEKFKKQDPENNGVMKFNGVKEATVDELNHFYKEYQSNKYADQSRFFDLIKKRFGNKALNPEELFELYFNGFYYNSSHRYIEDNKPAQNNLFSKVLENNKLLNPERSYGIDGFSNNVINALKSHKVLGLVHTTPLRYRHIISMWGADIDQDGKVKAIYVTDSDDREITFNDNSKRRIGMIRYDVLVDDNGNIRFTGKGATHKEEGAIYAGLYSLSRGDEVWEDYFKKYPEVQENL

SEQ ID NO: 338 - protein, 319 aa, synthetic construct
  VARIANT 1: note = M or absent or a signal peptide linked via a peptide bond
XTALGRRKAEDRIKETLWADGVKIDEKDFEHIKSSHEDYFAVEYGKGSGYYDVNKKMDSEDTALCVGAVVTNMFHWWVDQNRENIEKFKKQDPENNGVMKFNGVKEATVDELNHFYKEYQSNKYADQSRFFDLIKKKFGNKALNPEELFELYFNGFYYNSSHRYIEDNKPAQNNLFSKVLENNKLLNPERSYGIDGFSNNVINALKSHKVLGLVHTTPLRYRHIISMWGADIDQDGKVKAIYVTDSDDREITFNDNSKRRIGMIRYDVLVDDNGNIRFTGKGATHKEEGAIYAGLYSLSRGDEVWEDYFKKYPEVQENL

SEQ ID NO: 339 - protein, 319 aa, synthetic construct
  VARIANT 1: note = M or absent or a signal peptide linked via a peptide bond
XTALGRRKAEDRIKETLWADGVKIDEKDFEHIKSSHEDYFAVEYGKGSGYYDVNKKMDSEDTALCVGAVVTNMFHWWVDQNRENIEKFKKQDPENNGVMKFNGVKEATVDELNHFYKEYQSNKYADQSRFFDLIKKDFGNKALNPEELFELYFNGFYYNSSHRYIEDNKPAQNNLFSKVLENNKLLNPERSYGIDGFSNNVINALKSHKVLGLVHTTPLRYRHIISMWGADIDQDGKVKAIYVTDSDDREITFNDNSKRRIGMIRYDVLVDDNGNIRFTGKGATHKEEGAIYAGLYSLSRGDEVWEDYFKKYPEVQENL

SEQ ID NO: 340 - protein, 319 aa, synthetic construct
  VARIANT 1: note = M or absent or a signal peptide linked via a peptide bond
XTALGRRKAEDRIKETLWADGVKIDEKDFEHIKSSHEDYFAVEYGKGSGYYDVNKKMDSEDTALCVGAVVTNMFHWWVDQNRENIEKFKKQDPENNGVMKFNGVKEATVDELNHFYKEYQSNKYADQSRFFDLIKKHFGNKALNPEELFELYFNGFYYNSSHRYIEDNKPAQNNLFSKVLENNKLLNPERSYGIDGFSNNVIDALKSHKVLGLVHTTPLRYRHIISMWGADIDQDGKVKAIYVTDSDDREITFNDNSKRRIGMIRYDVLVDDNGNIRFTGKGATHKEEGAIYAGLYSLSRGDEVWEDYFKKYPEVQENL

SEQ ID NO: 341 - protein, 319 aa, synthetic construct
  VARIANT 1: note = M or absent or a signal peptide linked via a peptide bond
XTALGRRKAEDRIKETLWADGVKIDEKDFEHIKSSHEDYFAVEYGKGSGYYDVNKKMDSEDTALCVGAVVTNMFHWWVDQNRENIEKFKKQDPENNGVMKFNGVKEATVDELNHFYKEYQSNKYADQSRFFDLIKKHFGNKALNPEELFELYFNGFYYNSSHRYIEDNKPAQNNLFSKVLENNKLLNPERSYGIDGFSNNVINALKSGKVLGLVHTTPLRYRHIISMWGADIDQDGKVKAIYVTDSDDREITFNDNSKRRIGMIRYDVLVDDNGNIRFTGKGATHKEEGAIYAGLYSLSRGDEVWEDYFKKYPEVQENL

SEQ ID NO: 342 - protein, 319 aa, synthetic construct
  VARIANT 1: note = M or absent or a signal peptide linked via a peptide bond
XTALGRRKAEDRIKETLWADGVKIDEKDFEHIKSSHEDYFAVEYGKGSGYYDVNKKMDSEDTALCVGAVVTNMFHWWVDQNRENIEKFKKQDPENNGVMKFNGVKEATVDELNHFYKEYQSNKYADQSRFFDLIKKHFGNKALNPEELFELYFNGFYYNSSHRYIEDNKPAQNNLFSKVLENNKLLNPERSYGIDGFSNNVINALKSRKVLGLVHTTPLRYRHIISMWGADIDQDGKVKAIYVTDSDDREITFNDNSKRRIGMIRYDVLVDDNGNIRFTGKGATHKEEGAIYAGLYSLSRGDEVWEDYFKKYPEVQENL

SEQ ID NO: 343 - protein, 319 aa, synthetic construct
  VARIANT 1: note = M or absent or a signal peptide linked via a peptide bond
XTALGRRKAEDRIKETLWADGVKIDEKDFEHIKSSHEDYFAVEYGKGSGYYDVNKKMDSEDTALCVGAVVTNMFHWWVDQNRENIEKFKKQDPENNGVMKFNGVKEATVDELNHFYKEYQSNKYADQSRFFDLIKKHFGNKALNPEELFELYFNGFYYNSSHRYIEDNKPAQNNLFSKVLENNKLLNPERSYGIDGFSNNVINALKSSKVLGLVHTTPLRYRHIISMWGADIDQDGKVKAIYVTDSDDREITFNDNSKRRIGMIRYDVLVDDNGNIRFTGKGATHKEEGAIYAGLYSLSRGDEVWEDYFKKYPEVQENL

SEQ ID NO: 344 - protein, 319 aa, synthetic construct
  VARIANT 1: note = M or absent or a signal peptide linked via a peptide bond
XTALGRRKAEDRIKETLWADGVKIDEKDFEHIKSSHEDYFAVEYGKGSGYYDVNKKMDSEDTALCVGAVVTNMFHWWVDQNRENIEKFKKQDPENNGVMKFNGVKEATVDELNHFYKEYQSNKYADQSRFFDLIKKHFGNKALNPEELFELYFNGFYYNSSHRYIEDNKPAQNNLFSKVLENNKLLNPERSYGIDGFSNNVINALKSHKVLGLVHRTPLRYRHIISMWGADIDQDGKVKAIYVTDSDDREITFNDNSKRRIGMIRYDVLVDDNGNIRFTGKGATHKEEGAIYAGLYSLSRGDEVWEDYFKKYPEVQENL

SEQ ID NO: 345 - protein, 319 aa, synthetic construct
  VARIANT 1: note = M or absent or a signal peptide linked via a peptide bond
XTALGRRKAEDRIKETLWADGVKIDEKDFEHIKSSHEDYFAVEYGKGSGYYDVNKKMDSEDTALCVGAVVTNMFHWWVDQNRENIEKFKKQDPENNGVMKFNGVKEATVDELNHFYKEYQSNKYADQSRFFDLIKKHFGNKALNPEELFELYFNGFYYNSSHRYIEDNKPAQNNLFSKVLENNKLLNPERSYGIDGFSNNVINALKSHKVLGLVLTTPLRYRHIISMWGADIDQDGKVKAIYVTDSDDREITFNDNSKRRIGMIRYDVLVDDNGNIRFTGKGATHKEEGAIYAGLYSLSRGDEVWEDYFKKYPEVQENL

SEQ ID NO: 346 - protein, 319 aa, synthetic construct
  VARIANT 1: note = M or absent or a signal peptide linked via a peptide bond
XTALGRRKAEDRIKETLWADGVKIDEKDFEHIKSSHEDYFAVEYGKGSGYYDVNKKMDSEDTALCVGAVVTNMFHWWVDQNRENIEKFKKQDPENNGVMKFNGVKEATVDELNHFYKEYQSNKYADQSRFFDLIKKHFGNKALNPEELFELYFNGFYYNSSHRYIEDNKPAQNNLFSKVLENNKLLNPERSYGIDGFSNNVINALKSHKVLGLVHTTPGRYRHIISMWGADIDQDGKVKAIYVTDSDDREITFNDNSKRRIGMIRYDVLVDDNGNIRFTGKGATHKEEGAIYAGLYSLSRGDEVWEDYFKKYPEVQENL

SEQ ID NO: 347 - protein, 319 aa, synthetic construct
  VARIANT 1: note = M or absent or a signal peptide linked via a peptide bond
XTALGRRKAEDRIKETLWADGVKIDEKDFEHIKSSHEDYFAVEYGKGSGYYDVNKKMDSEDTALCVGAVVTNMFHWWVDQNRENIEKFKKQDPENNGVMKFNGVKEATVDELNHFYKEYQSNKYADQSRFFDLIKKHFGNKALNPEELFELYFNGFYYNSSHRYIEDNKPAQNNLFSKVLENNKLLNPERSYGIDGFSNNVINALKSHKVLGLVHTTPTRYRHIISMWGADIDQDGKVKAIYVTDSDDREITFNDNSKRRIGMIRYDVLVDDNGNIRFTGKGATHKEEGAIYAGLYSLSRGDEVWEDYFKKYPEVQENL

SEQ ID NO: 348 - protein, 319 aa, synthetic construct
  VARIANT 1: note = M or absent or a signal peptide linked via a peptide bond
XTALGRRKAEDRIKETLWADGVKIDEKDFEHIKSSHEDYFAVEYGKGSGYYDVNKKMDSEDTALCVGAVVTNMFHWWVDQNRENIEKFKKQDPENNGVMKFNGVKEATVDELNHFYKEYQSNKYADQSRFFDLIKKHFGNKALNPEELFELYFNGFYYNSSHRYIEDNKPAQNNLFSKVLENNKLLNPERSYGIDGFSNNVINALKSHKVLGLVHTTPLRHRHIISMWGADIDQDGKVKAIYVTDSDDREITFNDNSKRRIGMIRYDVLVDDNGNIRFTGKGATHKEEGAIYAGLYSLSRGDEVWEDYFKKYPEVQENL

SEQ ID NO: 349 - protein, 319 aa, synthetic construct
  VARIANT 1: note = M or absent or a signal peptide linked via a peptide bond
XTALGRRKAEDRIKETLWADGVKIDEKDFEHIKSSHEDYFAVEYGKGSGYYDVNKKMDSEDTALCVGAVVTNMFHWWVDQNRENIEKFKKQDPENNGVMKFNGVKEATVDELNHFYKEYQSNKYADQSRFFDLIKKHFGNKALNPEELFELYFNGFYYNSSHRYIEDNKPAQNNLFSKVLENNKLLNPERSYGIDGFSNNVINALKSHKVLGLVHTTPLRSRHIISMWGADIDQDGKVKAIYVTDSDDREITFNDNSKRRIGMIRYDVLVDDNGNIRFTGKGATHKEEGAIYAGLYSLSRGDEVWEDYFKKYPEVQENL

SEQ ID NO: 350 - protein, 319 aa, synthetic construct
  VARIANT 1: note = M or absent or a signal peptide linked via a peptide bond
XTALGRRKAEDRIKETLWADGVKIDEKDFEHIKSSHEDYFAVEYGKGSGYYDVNKKMDSEDTALCVGAVVTNMFHWWVDQNRENIEKFKKQDPENNGVMKFNGVKEATVDELNHFYKEYQSNKYADQSRFFDLIKKHFGNKALNPEELFELYFNGFYYNSSHRYIEDNKPAQNNLFSKVLENNKLLNPERSYGIDGFSNNVINALKSHKVLGLVHTTPLRYGHIISMWGADIDQDGKVKAIYVTDSDDREITFNDNSKRRIGMIRYDVLVDDNGNIRFTGKGATHKEEGAIYAGLYSLSRGDEVWEDYFKKYPEVQENL

SEQ ID NO: 351 - protein, 319 aa, synthetic construct
  VARIANT 1: note = M or absent or a signal peptide linked via a peptide bond
XTALGRRKAEDRIKETLWADGVKIDEKDFEHIKSSHEDYFAVEYGKGSGYYDVNKKMDSEDTALCVGAVVTNMFHWWVDQNRENIEKFKKQDPENNGVMKFNGVKEATVDELNHFYKEYQSNKYADQSRFFDLIKKHFGNKALNPEELFELYFNGFYYNSSHRYIEDNKPAQNNLFSKVLENNKLLNPERSYGIDGFSNNVINALKSHKVLGLVHTTPLRYNHIISMWGADIDQDGKVKAIYVTDSDDREITFNDNSKRRIGMIRYDVLVDDNGNIRFTGKGATHKEEGAIYAGLYSLSRGDEVWEDYFKKYPEVQENL

SEQ ID NO: 352 - protein, 319 aa, synthetic construct
  VARIANT 1: note = M or absent or a signal peptide linked via a peptide bond
XTALGRRKAEDRIKETLWADGVKIDEKDFEHIKSSHEDYFAVEYGKGSGYYDVNKKMDSEDTALCVGAVVTNMFHWWVDQNRENIEKFKKQDPENNGVMKFNGVKEATVDELNHFYKEYQSNKYADQSRFFDLIKKHFGNKALNPEELFELYFNGFYYNSSHRYIEDNKPAQNNLFSKVLENNKLLNPERSYGIDGFSNNVINALKSHKVLGLVHTTPLRYRHIISMWGADIDQDGKVKAIYVTDSDDREITFNDNSKRRIGMIRYDVLVDDDGNIRFTGKGATHKEEGAIYAGLYSLSRGDEVWEDYFKKYPEVQENL

SEQ ID NO: 353 - protein, 319 aa, synthetic construct
  VARIANT 1: note = M or absent or a signal peptide linked via a peptide bond
XTALGRRKAEDRIKETLWADGVKIDEKDFEHIKSSHEDYFAVEYGKGSGYYDVNKKMDSEDTALCVGAVVTNMFHWWVDQNRENIEKFKKQDPENNGVMKFNGVKEATVDELNHFYKEYQSNKYADQSRFFDLIKKHFGNKALNPEELFELYFNGFYYNSSHRYIEDNKPAQNNLFSKVLENNKLLNPERSYGIDGFSNNVINALKSHKVLGLVHTTPLRYRHIISMWGADIDQDGKVKAIYVTDSDDREITFNDNSKRRIGMIRYDVKVDDNGNIRFTGKGATHKEEGAIYAGLYSLSRGDEVWEDYFKKYPEVQENL

SEQ ID NO: 354 - protein, 319 aa, synthetic construct
  VARIANT 1: note = M or absent or a signal peptide linked via a peptide bond
XTALGRRKAEDRIKETLWADGVKIDEKDFEHIKSSHEDYFAVEYGKGSGYYDVNKKMDSEDTALCVGAVVTNMFHWWVDQNRENIEKFKKQDPENNGVMKFNGVKEATVDELNHFYKEYQSNKYADQSRFFDLIKKHFGNKALNPEELFELYFNGFYYNSSHRYIEDNKPAQNNLFSKVLENNKLLNPERSYGIDGFSNNVINALKSHKVLGLVHTTPLRYRHIISMWGADIDQDGKVKAIYVTDSDDREITFNDNSKRRIGMIRYDVRVDDNGNIRFTGKGATHKEEGAIYAGLYSLSRGDEVWEDYFKKYPEVQENL

SEQ ID NO: 355 - protein, 319 aa, synthetic construct
  VARIANT 1: note = M or absent or a signal peptide linked via a peptide bond
XTALGRRKAEDRIKETLWADGVKIDEKDFEHIKSSHEDYFAVEYGKGSGYYDVNKKMDSEDTALCVGAVVTNMFHWWVDQNRENIEKFKKQDPENNGVMKFNGVKEATVDELNHFYKEYQSNKYADQSRFFDLIKKHFGNKALNPEELFELYFNGFYYNSSHRYIEDNKPAQNNLFSKVLENNKLLNPERSYGIDGFSNNVINALKSHKVLGLVHTTPWRYRHIISMWGADIDQDGKVKAIYVTDSDDREITFNDNSKRRIGMIRYDVLVDDNGNIRFTGKGATHKEEGAIYAGLYSLSRGDEVWEDYFKKYPEVQENL

SEQ ID NO: 356 - protein, 319 aa, synthetic construct
  VARIANT 1: note = M or absent or a signal peptide linked via a peptide bond
XTALGRRKAEDRIKETLWADGVKIDEKDFEHIKSSHEDYFAVEYGKGSGYYDVNKKMDSEDTALCVGAVVTNMFHWWVDQNRENIEKFKKQDPENNGVMKFNGVKEATVDELNHFYKEYQSNKYADQSRFFDLIKKHFGNKALNPEELFELYFNGFYYNSSHRYIEDNKPAQNNLFSKVLENNKLLNPERSYGIDGFSNNVINALKSHKVLGLVHTTPYRYRHIISMWGADIDQDGKVKAIYVTDSDDREITFNDNSKRRIGMIRYDVLVDDNGNIRFTGKGATHKEEGAIYAGLYSLSRGDEVWEDYFKKYPEVQENL

SEQ ID NO: 357 - protein, 319 aa, synthetic construct
  VARIANT 1: note = M or absent or a signal peptide linked via a peptide bond
XTALGRRKAEERIKETLWADGVKIDEKDFEHIKSSHEDYFAVEYGKGSGYYDVNKKMDSEDTALCVGAVVTNMFHWWVDQNRENIEKFKKQDPENNGVMKFNGVKEATVDELNHFYKEYQSNKYADQSKFFDLIKKHFGNKALNPEELFELYFNGFYYNSSHRYIEDNKPAQNNLFSKVLENNKLLNPERSYGIDGFSNNVINALKSHKVLGLVHTTPLRYRHIISMWGADIDQDGKVKAIYVTDSDDREITFNDNSKRRIGMIRYDVLVDDFGNIRFTGKGYTHKEEGAIYAGLYSLSRGDEVWEDYFKKYPEVQENL

SEQ ID NO: 358 - protein, 319 aa, synthetic construct
  VARIANT 1: note = M or absent or a signal peptide linked via a peptide bond
XTALGRRKAEERIKETLWADGVKIDEKDFEHIKDSHEDYFAVEYGKGSGYYDVNKKMDSEDTALCVGAVVTNMFHWWVDQNRDNIEKFKKQDPENNGVMKFNGVKEATVDELNHFYKEYQSNKYADQSKFFDLIKKHFGNKALNPEELFELYFNGFYYNSSHRYIEDNKPAQNNLFSKVLENNKLLNPERSYGIDGFSNNVINALKSHKVLGLVHTTPLRYRHIISMWGADIDEDGKVKAIYVTDSDDREITFNDNSKRRIGMIRYDVLVDDNGNIRFTGKGYTHKEEGAIYAGLYSLSRGDEVWEDYFKKYPEVQENL

SEQ ID NO: 359 - protein, 319 aa, synthetic construct
  VARIANT 1: note = M or absent or a signal peptide linked via a peptide bond
XTALGRRKAEERIKETLWADGVKVDEKDFEHIKDSHEDYFAVEYGKGSGYYDVNKKMDSEDTALCVGAVVTNMFHWWVDQNRDNIEKFKKQDPENNGVMKFNGVKEATVDELNHFYKEYQSNKYADQSKFFDLIKKHFGNKALNPEELFELYFNGFYYNSSHRYIEDNKPAQNNLFSKVLEGNKLLNPERSYGIDGFSNNVINALKSHKVLGLVHTTPLRYRHIISMWGADIDEDGKVKAIYVTDSDDREITFNDNSKRRIGMIRYDVLVDDNGNIRFTGKGYTHKEEGAIYAGLYSLSRGDEVWEDYFKKYPEVQENL

SEQ ID NO: 360 - protein, 319 aa, synthetic construct
  VARIANT 1: note = M or absent or a signal peptide linked via a peptide bond
XTALGRRKAEERIKETLWADGVKVDDKDFEKIKDSHEDYFAVEYGKGSGYYDVNKKMDSEDTALCVGAVVTNMFHWWVDQNRDNIEKFKKQDPENNGVMKFNGVKEATVDELNHFYKEYQDNKYADQSKFFDLIKKHFGNKALNPEELFELYFNGFYYNSSHRYIEDKKPAQNNLFSKVLEGKLLLNPERSYGIDDFSNNVINALKSHKVLGLVHTTPLRYRHIISMWGADIDEDGKVKAIYVTDSDDREITFNDNSKRRIGMIRYDVLVDDNGNIRFTGKGYTHKEEGAIYAGLYSLSRGDEVWEDYFKKYPEVQENL

SEQ ID NO: 361 - protein, 319 aa, synthetic construct
  VARIANT 1: note = M or absent or a signal peptide linked via a peptide bond
XTALGRRKAEDRIKETLWADGVKIDEKDFEHIKSSHEDYFAVEYGKGSGYYDVNKKMDSEDTALCVGAVVTNMFHWWVDQNRENIEKFKKQDPENNGVMKFNGVKEATVDELNHFYKEYQSNKYADQSRFFDLIKKHFGNKALNPEELFELYFNGFYYNSSHRYIEDNKPAQNNLFSKVLENNKLLNPERSYGIDGFSNAVINALKSHKVLGLVHTTPLRYRHIISMWGADIDQDGKVKAIYVTDSDDREITFNDNSKRRIGMIRYDVLVDDNGNIRFTGKGATHPNEGAIYAGLYSLSRGDEVWEDYFKKYPPVQENL

SEQ ID NO: 362 - protein, 319 aa, synthetic construct
  VARIANT 1: note = M or absent or a signal peptide linked via a peptide bond
XTALGRRKAEDRIKETLWADGVKIDEKDFEHIKSSHEDYFAVEYGKGSGYYDVNKKMDSEDTALCVGAVVTNMFHWWVDQNRENIEKFKKQDPENNGVMKFNGKKEATVDELNHFYKEYQSNKYADQSRFFDLIKKHFGNKALNPEELFELYFNGFYYNSSHRYIEDNKPAQNNLFSKVLENNKLLNPERSYGIDGFSNAVINALKSHKVLGLVHTTPLRYRHIISMWGADIDQDGKVKAIYVTDSDDREITFNDNSKRRIGMIRYDVLVDDNGNIRFTGKGATHPNEGAIYAGLYSLSRGDEVWEDYFKKYPPVQENL

SEQ ID NO: 363 - protein, 319 aa, synthetic construct
  VARIANT 1: note = M or absent or a signal peptide linked via a peptide bond
XTALGRRKAEDRIKETLWADGVKIDEKDFEHIKSSHEDYFAVEYGKGSGYYDVNKKMDSEDTALCVGAVVTNMFHWWVDQNRENIEKFKKQDPENNGVMKFNGVKEATVDELNHIYKEYQSNKYADQSRFFDLIKKHFGNKALNPEELFELYFNGFYYNSSHRYIEDNKPAQNNLFSKVLENNKLLNPERSYGIDGFSNAVINALKSHKVLGLVHTTPLRYRHIISMWGADIDQDGKVKAIYVTDSDDREITFNDNSKRRIGLIRYDVLVDDNGNIRFTGKGATHPNEGAIYAGLYSLSRGDEVWEDYFKKYPPVQENL

SEQ ID NO: 364 - protein, 319 aa, synthetic construct
  VARIANT 1: note = M or absent or a signal peptide linked via a peptide bond
XTALGRRKAEDRIKETLWADGVKIDEKDFEHIKSSHEDYFAVEYGKGSGYYDVNKKMDSEDTALCVGAVVTNMFHWWVDQNKENIEKFKKQDPENNGVMKFNGVKEATVDELNHFYKEYQSNKYADQSRFFDLIKKHFGNKALNPEELFELYFNGFYYNSSHRYIEDNKPAQNNLFSKVLENNKLLNPERSYGIDGFSNAVINALKSHKVLGLVHTTPLRYRHIISMWGADIDQDGKVKAIYVTDSDDREITFNDNSKRRIGMIRYDVLVDDNGNIRFTGKGATHPNEGAIYAGLYSLSRGDEVWEDYFKKYPEVQENL

SEQ ID NO: 365 - protein, 319 aa, synthetic construct
  VARIANT 1: note = M or absent or a signal peptide linked via a peptide bond
XTALGRRKAEDRIKETLWADGVKIDEKDFEHIKSSHEDYFAVEYGKGSGYYDVNKKMDSEDTALCVGAVVTNMFHWWVDQNKENIEKFKKQDPENNGVMKFNGVKEATVDELNHFYKEYQSNKYADQSRFFDLIKKHFGNKALNPEELFELYFNGFYYNSSHRYIEDNKPAENNLFSKVLENNKLLNPERSYGIDGFSNAVINALKSHKVLGLVHTTPLRYRHIISMWGADIDQDGKVKAIYVTDSDDREITFNDNSKRRIGMIRYDVLVDDNGNILFTGKGATHPNEGAIYAGLYSLSRGDEVWEDYFKKYPEVQENL

SEQ ID NO: 366 - protein, 319 aa, synthetic construct
  VARIANT 1: note = M or absent or a signal peptide linked via a peptide bond
XTALGRRKAEDRIKETLWADGVKIDEKDFEHIKSSHEDYFAVEYGKGSGYYDVNKKMDSEDTALCVGAVVTNMFHWWVDQNKENIEKFKKQDPENNGVMKFNGVKEATVDELNHFYKEYQSNKYADQSRFFDLIKKHFGNKALNPEELFELYFNGFWYNSSHRYIEDNKPAQNNLFSKVLENNKLLNPERSYGIDGFSNAVINALKSHKVLGLVHTTPLRYRHIISMWGADIDQDGKVKAIYVTDSDDREITFNDNSKRRIGMIRYDVLVDDNGNILFTGKGATHPNEGAIYAGLYSLSRGDEVWEDYFKKYPEVQENL

SEQ ID NO: 367 - protein, 319 aa, synthetic construct
  VARIANT 1: note = M or absent or a signal peptide linked via a peptide bond
XTALGRRKAEDRIKETLWADGVKIDEKDFEHIKSSHEDYFAVEYGKGSGYYDVNLKMDSEDTALCVGAVVTNMFHWWVDQNKENIEKFKKQDPENNGVMKFNGVKEATVDELNHFYKEYQSNKYADQSRFFDLIKKHFGNKALNPEELFELYFNGFYYNSSHRYIEDNKPAQNNLFSKVLENNKLLNPERSYGIDGFSNAVINALKSHKVLGLVHTTPLRYRHIISMWGADIDQDGKVKAIYVTDSDDREITFNDNSKRRIGMIRYDVLVDDNGNILFTGKGATHPNEGAIYAGLYSLSRGDEVWEDYFKKYPEVQENL

SEQ ID NO: 368 - protein, 319 aa, synthetic construct
  VARIANT 1: note = M or absent or a signal peptide linked via a peptide bond
XTALGRRKAEDRIKETLWADGVKIDEKDFEHIKSSHEDYFAVEYGKGSGYYDVNKKMDSEDTALCVGAVVTNMFHWWVDQNKENIEKYKKQDPENNGVMKFNGVKEATVDELNHFYKEYQSDKYADQSRFFDLIKKHFGNKALNPEELFELYFNGFYYNSSHRYIEDNKPAQNNLFSKVLENNKLLNPERSYGIDGFSNAVINALKSHKVLGLVHTTPLRYRHIITMWGADIDQDGKVKAIYVTDSDDREITFNDNSKRRIGLIRYDVLVDDNGNIRFTGKGATHPNEGAIYAGLYSLSRGDEVWEDYFKKYPEVQENL

SEQ ID NO: 369 - protein, 319 aa, synthetic construct
  VARIANT 1: note = M or absent or a signal peptide linked via a peptide bond
XTELEEYLAKNNIVKTLWAPGVNVEYSDFEHIKSSHEDYFAVEYGKGSGYYDVNKKMDSEDTALCVGAVVTNMFHWWVDQNKENIEIFKSIDPENNGVMKFNGVKEATVDELNHIYKESPEDKYADQSRFFDLIKKHFGNKALNPEELFELYFNGFYYNSSHRYIEDNKPAQNNLFSKVLENTRLLKKLEAKGEEAFSKAVIEALNNHKVLGLVHTTPLRYRHIISMWGADIDQDGKVKAIYVTDSDDREITFNDNSKRRIGMIRYDVLVDDNGNIRFTGKGATHKEEGAIYAGLYSLSLGEEVWENYFKKYKPPQENL

SEQ ID NO: 370 - protein, 319 aa, synthetic construct
  VARIANT 1: note = M or absent or a signal peptide linked via a peptide bond
XTELEEYLKERNIVKTLWAPGVNVSYSDFEHIKSSHEDYFAVEYGKGSGYYDVNKKMDSEDTALCVGAVVTNMFHWWVDQNKENIKLFVSMDPENNGVMKFNGVKEATVDELNHLYKEDPSDKYADQSRFFDLIKKHFGNKALNPEELFELYFNGFYYNSSHRYIEDNKPAQNNLFSKVLENERLLKKLEVKGYDGFSQAIIDALQNHKVLGLVHTTPLRYRHIISMWGADIDQDGKVKAIYVTDSDDREITFNDNSKRRIGMIRYDVLVDDNGNIRFTGKGATHKEEGAIYAGLYSLSLGEEVWEKYFEKNKPPQENL

SEQ ID NO: 371 - protein, 319 aa, synthetic construct
  VARIANT 1: note = M or absent or a signal peptide linked via a peptide bond
XTELEEYKKSKNIVETLWAEGVDIKDEDFEHIKSSHEDYFAVELGKGSGYYDVNKKMDSEDTALCVGAVVTNMFHWWVDQNKENIKKFISIDPENNGVMKFNGVKEATVDELNHLYRRDPSDKYADQSRFFDLIKKHFGNKALNPEELFELYFNGFYYNSSHRYIEDNKPAQNNLFSKVLENTRLLKKLETNGYDGFSEAVIDALKNHKVLGLVHTTPLRYRHIISMWGADIDQDGKVKAIYVTDSDDREITFNDNSKRRIGMIRYDVLVDDNGNIRFTGKGATHKEEGAIYAGLYSLSLGKEVWENYFKKHKPPQENL

SEQ ID NO: 372 - protein, 319 aa, synthetic construct
  VARIANT 1: note = M or absent or a signal peptide linked via a peptide bond
XTDLAAWKASQNIVKTLWAPGVNIKDSDFEHIKSSHEDYFAVELGKGSGYYDVNKKMDSEDTALCVGAVVTNMFHWWVDQNKENIKKFIAINPENNGVMKFNGVKEATVDELNHLYRESPEDKYADQSRFFDLIKKHFGNKALNPEELFELYFNGFYYNSSHRYIEDNKPAQNNLFSKVLENTRLLKKLEVNGEEGFSKAVIDALQNHKVLGLVHTTPLRYRHIISMWGADIDQDGKVKAIYVTDSDDREITFNDNSKRRIGMIRYDVLVDDNGNIRFTGKGATHKEEGAIYAGLYSLSLGEEVWKNYFEKNKPPQENL

SEQ ID NO: 373 - protein, 319 aa, synthetic construct
  VARIANT 1: note = M or absent or a signal peptide linked via a peptide bond
XTELEEYLKERNIVKTLWAPGVNVSYSDFEHIKSSHEDYFAVEYGKGSGYYDVNKKMDSEDTALCVGAVVTNMFHWWVDQNKENIKLFVSMDPENNGVMKFEGVKEATVDELNHLYKEDPSDKYADQSRFFDLIKKHFGNKALNPEELFELYFNGFYYNSSHRYIEDNEPAQNNLFSKVLENERLLKKLEVKGYDGFSQAIIDALQNHKVLGLVHTTPLTYRHIISMWGADIDQDGKVKAIYVTDSDDREITFNDNSKRRIGMIRYDVLVDDNGNIRFTGKGATHKEEGAIYAGLYSLSLGEEVWEKYFEKNKPPQENL

SEQ ID NO: 374 - protein, 317 aa, synthetic construct
TALGRRKAEDRIKETLWADGVKIDEKDFEHIKSSHEDYFAVEYGKGSGYYDVNKKMDSEDTALCVGAVVTNMFHWWVDQNRENIEKFKKQDPENNGVMKFEGVKEATVDELNEFYRDNRDNYADQSRFFDLIKKHFGNKALNPEELFELYFNGFYYGSSHRYIEDNEPAQGNLFSKVLENNKLLNPERSYGIDGFSNNVINALKSHKVLGLVYTTPLRYRHIISMWGADIDQDGKVKAIYVTDSDDREITFNDNSKRRIGMIRYDVLVDKNGNIRFTGKGATHKEEGAIYAGLYSLSRGDEVWEDYFKKYPEVQENL

SEQ ID NO: 375 - protein, 317 aa, synthetic construct
TALGRRKAEDRIKETLWADGVKIDEKDFEHIKSSHEDYFAVEYGKGSGYYDVNKKMDSEDTALSVGAVVTNMFHWWVDQNRENIEKFKKQDPENNGVMKFEGVKEATVDELNEFYRDNRDNYADQSRFFDLIKKHFGNKALNPEELFELYFNGFYYGSSHRYIEDNEPAQGNLFSKVLENNKLLNPERSYGIDGFSNNVINALKSHKVLGLVYTTPLRYRHIISMWGADIDQDGKVKAIYVTDSDDREITFNDNSKRRIGMIRYDVLVDKNGNIRFTGKGATHKEEGAIYAGLYSLSRGDEVWEDYFKKYPEVQENL

SEQ ID NO: 376 - protein, 317 aa, synthetic construct
TALGRRKAEDRIKETLWADGVKIDEKDFEHIKSSHEDYFAVEYGKGSGYYDVNKKMDSEDSALCVGAVVTNMFHWWVDQNRENIEKFKKQDPENNGVMKFEGVKEATVDELNEFYRDNRDNYADQSRFFDLIKKHFGNKALNPEELFELYFNGFYYGSSHRYIEDNEPAQGNLFSKVLENNKLLNPERSYGIDGFSNNVINALKSHKVLGLVYTTPLRYRHIISMWGADIDQDGKVKAIYVTDSDDREITFNDNSKRRIGMIRYDVLVDKNGNIRFTGKGATHKEEGAIYAGLYSLSRGDEVWEDYFKKYPEVQENL

SEQ ID NO: 377 - protein, 317 aa, synthetic construct
TALGRRKAEDRIKETLWADGVKIDEKDFEHIKSSHEDYFAVEYGKGSGYYDVNKKMDSEDSALSVGAVVTNMFHWWVDQNRENIEKFKKQDPENNGVMKFEGVKEATVDELNEFYRDNRDNYADQSRFFDLIKKHFGNKALNPEELFELYFNGFYYGSSHRYIEDNEPAQGNLFSKVLENNKLLNPERSYGIDGFSNNVINALKSHKVLGLVYTTPLRYRHIISMWGADIDQDGKVKAIYVTDSDDREITFNDNSKRRIGMIRYDVLVDKNGNIRFTGKGATHKEEGAIYAGLYSLSRGDEVWEDYFKKYPEVQENL

SEQ ID NO: 378 - protein, 317 aa, synthetic construct
TALGRRKAEDRIKETLWADGVKIDEKDFEHIKSSHEDYFAVEYGKGSGYYDVNKKMDSEDTALCVGAVVTNMFHWWVDQNRENIEKFKKQDPENNGVMKFEGVKEATVDELNEFYRDNRDNYADQSRFFDLIKKHFGNKALNPEELFELYFNGFYYGSSHRYIEDNEPAQNNLFSKVLENNKLLNPERSYGIDGFSNNVINALKSHKVLGLVYTTPLRYRHIISMWGADIDQDGKVKAIYVTDSDDREITFNDNSKRRIGMIRYDVLVDDNGNIRFTGKGATHKEEGAIYAGLYSLSRGDEVWEDYFKKYPEVQENL

SEQ ID NO: 379 - protein, 317 aa, synthetic construct
TALGRRKAEDRIKETLWADGVKIDEKDFEHIKSSHEDYFAVEYGKGSGYYDVNKKMDSEDTALSVGAVVTNMFHWWVDQNRENIEKFKKQDPENNGVMKFEGVKEATVDELNEFYRDNRDNYADQSRFFDLIKKHFGNKALNPEELFELYFNGFYYGSSHRYIEDNEPAQNNLFSKVLENNKLLNPERSYGIDGFSNNVINALKSHKVLGLVYTTPLRYRHIISMWGADIDQDGKVKAIYVTDSDDREITFNDNSKRRIGMIRYDVLVDDNGNIRFTGKGATHKEEGAIYAGLYSLSRGDEVWEDYFKKYPEVQENL

SEQ ID NO: 380 - protein, 317 aa, synthetic construct
TALGRRKAEDRIKETLWADGVKIDEKDFEHIKSSHEDYFAVEYGKGSGYYDVNKKMDSEDSALCVGAVVTNMFHWWVDQNRENIEKFKKQDPENNGVMKFEGVKEATVDELNEFYRDNRDNYADQSRFFDLIKKHFGNKALNPEELFELYFNGFYYGSSHRYIEDNEPAQNNLFSKVLENNKLLNPERSYGIDGFSNNVINALKSHKVLGLVYTTPLRYRHIISMWGADIDQDGKVKAIYVTDSDDREITFNDNSKRRIGMIRYDVLVDDNGNIRFTGKGATHKEEGAIYAGLYSLSRGDEVWEDYFKKYPEVQENL

SEQ ID NO: 381 - protein, 317 aa, synthetic construct
TALGRRKAEDRIKETLWADGVKIDEKDFEHIKSSHEDYFAVEYGKGSGYYDVNKKMDSEDSALSVGAVVTNMFHWWVDQNRENIEKFKKQDPENNGVMKFEGVKEATVDELNEFYRDNRDNYADQSRFFDLIKKHFGNKALNPEELFELYFNGFYYGSSHRYIEDNEPAQNNLFSKVLENNKLLNPERSYGIDGFSNNVINALKSHKVLGLVYTTPLRYRHIISMWGADIDQDGKVKAIYVTDSDDREITFNDNSKRRIGMIRYDVLVDDNGNIRFTGKGATHKEEGAIYAGLYSLSRGDEVWEDYFKKYPEVQENL

SEQ ID NO: 382 - protein, 469 aa, synthetic construct
  VARIANT 1: note = M or absent or a signal peptide linked via a peptide bond
XTALGRRKAEDRIKETLWADGVKIDEKDFEHIKSSHEDYFAVEYGKGSGYYDVNKKMDSEDTALCVGAVVTNMFHWWVDQNRENIEKFKKQDPENNGVMKFNGVKEATVDELNHFYKEYQSNKYADQSRFFDLIKKHFGNKALNPEELFELYFNGFYYNSSHRYIEDNKPAQNNLFSKVLENNKLLNPERSYGIDGFSNNVINALKSHKVLGLVHTTPLRYRHIISMWGADIDQDGKVKAIYVTDSDDREITFNDNSKRRIGMIRYDVLVDDNGNIRFTGKGATHKEEGAIYAGLYSLSRGDEVWEDYFKKYPEVQENLENNVADSNKNSEDVEVSSVEFDFLNFKYPKNEDQVSTEDMRLTLKDTNVFNQPQVKISFEEQNGNDWKEKDSGTFEEGKKYRLKIDVNKLALKIYGHLSKNKLNVIVNGKAVNIQNVVKKDSIETSFTIYSDSIDLEKINYWTDSFNNWS

SEQ ID NO: 383 - protein, 318 aa, synthetic construct
  VARIANT 1: note = M or absent or a signal peptide linked via a peptide bond
XTALGRRKAEDRIKETLWADGVKIDEKDFEHIKSSHEDYFAVEYGKGSGYYDVNKKMDSEDTALCVGAVVTNMFHWWVDQNRENIEKFKKQDPENNGVMKFEGVKEATVDELNHFYRDNRDNYADQSRFFDLIKKHFGNKALNPEELFELYFNGFYYGSSHRYIEDNEPAQNNLFSKVLENNKLLNPERSYGIDGFSNNVINALKSHKVLGLVHTTPLRYRHIISMWGADIDQDGKVKAIYVTDSDDREITFNDNSKRRIGMIRYDVLVDDNGNIRFTGKGATHKEEGAIYAGLYSLSRGDEVWEDYFKKYPEVQENL

SEQ ID NO: 384 - protein, 318 aa, synthetic construct
  VARIANT 1: note = M or absent or a signal peptide linked via a peptide bond
XTALGRRKAEDRIKETLWADGVKIDEKDFEHIKSSHEDYFAVEYGKGSGYYDVNKKMDSEDTALCVGAVVTNMFHWWVDQNRENIEKFKKQDPENNGVMKFEGVKEATVDELNHFYRDNRDNYADQSRFFDLIKKHFGNKALNPEELFELYFNGFYYGSSHRYIEDNEPAQNNLFSKVLENNKLLNPERSYGIDGFSNNVINALKSHKVLGLVYTTPLRYRHIISMWGADIDQDGKVKAIYVTDSDDREITFNDNSKRRIGMIRYDVLVDDNGNIRFTGKGATHKEEGAIYAGLYSLSRGDEVWEDYFKKYPEVQENL

SEQ ID NO: 385 - protein, 318 aa, synthetic construct
  VARIANT 1: note = M or absent or a signal peptide linked via a peptide bond
XTALGRRKAEDRIKETLWADGVKIDEKDFEHIKSSHEDYFAVEYGKGSGYYDVNKKMDSEDSALCVGAVVTNMFHWWVDQNRENIEKFKKQDPENNGVMKFEGVKEATVDELNHFYRDNRDNYADQSRFFDLIKKHFGNKALNPEELFELYFNGFYYGSSHRYIEDNEPAQNNLFSKVLENNKLLNPERSYGIDGFSNNVINALKSHKVLGLVHTTPLRYRHIISMWGADIDQDGKVKAIYVTDSDDREITFNDNSKRRIGMIRYDVLVDDNGNIRFTGKGATHKEEGAIYAGLYSLSRGDEVWEDYFKKYPEVQENL

SEQ ID NO: 386 - protein, 318 aa, synthetic construct
  VARIANT 1: note = M or absent or a signal peptide linked via a peptide bond
XTALGRRKAEDRIKETLWADGVKIDEKDFEHIKSSHEDYFAVEYGKGSGYYDVNKKMDSEDTALCVGAVVTNMFHWWVDQNRENIEKFKKQDPENNGVMKFEGVKEATVDELNHFYRDNRDNYADQSRFFDLIKKHFGNKALNPEELFELYFNGFYYGSSHRYIEDNEPAQNNLFSKVLENNKLLNPERSYGIDGFSNNVINALKSHKVLGLVYTTPLTYRHIISMWGADIDQDGKVKAIYVTDSDDREITFNDNSKRRIGMIRYDVLVDDNGNIRFTGKGATHKEEGAIYAGLYSLSRGDEVWEDYFKKYPEVQENL

SEQ ID NO: 387 - protein, 318 aa, synthetic construct
  VARIANT 1: note = M or absent or a signal peptide linked via a peptide bond
XTALGRRKAEDRIKETLWADGVKIDEKDFEHIKSSHEDYFAVEYGKGSGYYDVNKKMDSEDSALCVGAVVTNMFHWWVDQNRENIEKFKKQDPENNGVMKFEGVKEATVDELNHFYRDNRDNYADQSRFFDLIKKHFGNKALNPEELFELYFNGFYYGSSHRYIEDNEPAQNNLFSKVLENNKLLNPERSYGIDGFSNNVINALKSHKVLGLVHTTPLTYRHIISMWGADIDQDGKVKAIYVTDSDDREITFNDNSKRRIGMIRYDVLVDDNGNIRFTGKGATHKEEGAIYAGLYSLSRGDEVWEDYFKKYPEVQENL

SEQ ID NO: 388 - protein, 318 aa, synthetic construct
  VARIANT 1: note = M or absent or a signal peptide linked via a peptide bond
XTALGRRKAEQRIKETLWADGVKIDEKDFEHIKSSHEDYFAVEYGKGSGYYDVNKKMDSEDTALCVGAVVTNMFHWWVDQNRENIEKFKKQDPENNGVMKFEGVKEATVDELNHFYRDNRDNYADQSRFFDLIKKHFGNKALNPEELFELYFNGFYYGSSHRYIEDNEPAQNNLFSKVLENNKLLNPERSYGIDGFSNNVINALKSHKVLGLVHTTPLRYRHIISMWGADIDQDGKVKAIYVTDSDDREITFNDNSKRRIGMIRYDVLVDDNGNIRFTGKGATHKEEGAIYAGLYSLSRGDEVWEDYFKKYPEVQENL

SEQ ID NO: 389 - protein, 318 aa, synthetic construct
  VARIANT 1: note = M or absent or a signal peptide linked via a peptide bond
XTALGRRKAEDRIKETLWADGVKIDEKDFEHIKSSHEDYFAVEYGKGSGYYDVNKKMDSEDSALCVGAVVTNMFHWWVDQNRENIEKFKKQDPENNGVMKFEGVKEATVDELNHFYRDNRDNYADQSRFFDLIKKHFGNKALNPEELFELYFNGFYYGSSHRYIEDNEPAQNNLFSKVLENNKLLNPERSYGIDGFSNNVINALKSHKVLGLVYTTPLRYRHIISMWGADIDQDGKVKAIYVTDSDDREITFNDNSKRRIGMIRYDVLVDDNGNIRFTGKGATHKEEGAIYAGLYSLSRGDEVWEDYFKKYPEVQENL

SEQ ID NO: 390 - protein, 318 aa, synthetic construct
  VARIANT 1: note = M or absent or a signal peptide linked via a peptide bond
XTALGRRKAEDRIKETLWADGVKIDEKDFEHIKSSHEDYFAVEYGKGSGYYDVNKKMDSEDTALCVGAVVTNMFHWWVDQNRENIEKFKKQDPENNGVMKFEGVKEATVDELNHFYRDNRDNYADQSRFFDLIKKHFGNKALNPEELFELYFNGFYYGSSHRYIEDNEPAQNNLFSKVLENNKLLNPERSYGIDGFSNNVINALKSHKVLGLVYTTPLRYRHIISMWGADIDQDGKVKAIYVTDSDDREITFNDNSSRRIGMIRYDVLVDDNGNIRFTGKGATHKEEGAIYAGLYSLSRGDEVWEDYFKKYPEVQENL

SEQ ID NO: 391 - protein, 318 aa, synthetic construct
  VARIANT 1: note = M or absent or a signal peptide linked via a peptide bond
XTALGRRKAEDRIKETLWADGVKIDEKDFEHIKSSHEDYFAVEYGKGSGYYDVNKKMDSEDTALCVGAVVTNMFHWWVDQNRENIEKFKKQDPENNGVMKFEGVKEATVDELNHFYRDNRDNYADQSRFFDLIKKHFGNKALNPEELFELYFNGFYYGSSHRYIEDNEPAQNNLFSKVLENNKLLNPERSYGIDGFSNNVINALKSHKVLGLVHTTPLRYRHIISMWGADIDQDGKVKAIYVTDSDDREITFNDNSSRRIGMIRYDVLVDDNGNIRFTGKGATHKEEGAIYAGLYSLSRGDEVWEDYFKKYPEVQENL

SEQ ID NO: 392 - protein, 318 aa, synthetic construct
  VARIANT 1: note = M or absent or a signal peptide linked via a peptide bond
XTALGRRKAEDRIKETLWADGVKIDEKDFEHIKSSHEDYFAVEYGKGSGYYDVNKKMDSEDTALCVGAVVTNMFHWWVDQNRENIEKFKKQDPENNGVMKFNGVKEATVDELNHFYRDNRDNYADQSRFFDLIKKHFGNKALNPEELFELYFNGFYYGSSHRYIEDNKPAQNNLFSKVLENNKLLNPERSYGIDGFSNNVINALKSHKVLGLVYTTPLRYRHIISMWGADIDQDGKVKAIYVTDSDDREITFNDNSKRRIGMIRYDVLVDDNGNIRFTGKGATHKEEGAIYAGLYSLSRGDEVWEDYFKKYPEVQENL

SEQ ID NO: 393 - protein, 318 aa, synthetic construct
  VARIANT 1: note = M or absent or a signal peptide linked via a peptide bond
XTALGRRKAEDRIKETLWADGVKIDEKDFEHIKSSHEDYFAVEYGKGSGYYDVNKKMDSEDSALCVGAVVTNMFHWWVDQNRENIEKFKKQDPENNGVMKFNGVKEATVDELNHFYRDNRDNYADQSRFFDLIKKHFGNKALNPEELFELYFNGFYYGSSHRYIEDNKPAQNNLFSKVLENNKLLNPERSYGIDGFSNNVINALKSHKVLGLVHTTPLRYRHIISMWGADIDQDGKVKAIYVTDSDDREITFNDNSKRRIGMIRYDVLVDDNGNIRFTGKGATHKEEGAIYAGLYSLSRGDEVWEDYFKKYPEVQENL

SEQ ID NO: 394 - protein, 318 aa, synthetic construct
  VARIANT 1: note = M or absent or a signal peptide linked via a peptide bond
XTALGRRKAEQRIKETLWADGVKIDEKDFEHIKSSHEDYFAVEYGKGSGYYDVNKKMDSEDTALCVGAVVTNMFHWWVDQNRENIEKFKKQDPENNGVMKFNGVKEATVDELNHFYRDNRDNYADQSRFFDLIKKHFGNKALNPEELFELYFNGFYYGSSHRYIEDNKPAQNNLFSKVLENNKLLNPERSYGIDGFSNNVINALKSHKVLGLVHTTPLRYRHIISMWGADIDQDGKVKAIYVTDSDDREITFNDNSKRRIGMIRYDVLVDDNGNIRFTGKGATHKEEGAIYAGLYSLSRGDEVWEDYFKKYPEVQENL

SEQ ID NO: 395 - protein, 318 aa, synthetic construct
  VARIANT 1: note = M or absent or a signal peptide linked via a peptide bond
XTALGRRKAEDRIKETLWADGVKIDEKDFEHIKSSHEDYFAVEYGKGSGYYDVNKKMDSEDTALCVGAVVTNMFHWWVDQNRENIEKFKKQDPENNGVMKFEGVKEATVDELNHFYRDNRDNYADQSRFFDLIKKHFGNKALNPEELFELYFNGFYYQSSHRYIEDNEPAQNNLFSKVLENNKLLNPERSYGIDGFSNNVINALKSHKVLGLVHTTPLRYRHIISMWGADIDQDGKVKAIYVTDSDDREITFNDNSKRRIGMIRYDVLVDDNGNIRFTGKGATHKEEGAIYAGLYSLSRGDEVWEDYFKKYPEVQENL

SEQ ID NO: 396 - protein, 318 aa, synthetic construct
  VARIANT 1: note = M or absent or a signal peptide linked via a peptide bond
XTALGRRKAEQRIKETLWADGVKIDEKDFEHIKSSHEDYFAVEYGKGSGYYDVNKKMDSEDTALCVGAVVTNMFHWWVDQNRENIEKFKKQDPENNGVMKFEGVKEATVDELNHFYRDNRDNYADQSRFFDLIKKHFGNKALNPEELFELYFNGFYYQSSHRYIEDNEPAQNNLFSKVLENNKLLNPERSYGIDGFSNNVINALKSHKVLGLVHTTPLRYRHIISMWGADIDQDGKVKAIYVTDSDDREITFNDNSKRRIGMIRYDVLVDDNGNIRFTGKGATHKEEGAIYAGLYSLSRGDEVWEDYFKKYPEVQENL

SEQ ID NO: 397 - protein, 318 aa, synthetic construct
  VARIANT 1: note = M or absent or a signal peptide linked via a peptide bond
XTALGRRKAEDRIKETLWADGVKIDEKDFEHIKSSHEDYFAVEYGKGSGYYDVNKKMDSEDTALCVGAVVTNMFHWWVDQNRENIEKFKKQDPENNGVMKFEGVKEATVDELNHFYRDNRDNYADQSRFFDLIKKHFGNKALNPEELFELYFNGFYYQSSHRYIEDNEPAQNNLFSKVLENNKLLNPERSYGIDGFSNNVINALKSHKVLGLVYTTPLRYRHIISMWGADIDQDGKVKAIYVTDSDDREITFNDNSKRRIGMIRYDVLVDDNGNIRFTGKGATHKEEGAIYAGLYSLSRGDEVWEDYFKKYPEVQENL

SEQ ID NO: 398 - protein, 318 aa, synthetic construct
  VARIANT 1: note = M or absent or a signal peptide linked via a peptide bond
XTALGRRKAEDRIKETLWADGVKIDEKDFEHIKSSHEDYFAVEYGKGSGYYDVNKKMDSEDSALCVGAVVTNMFHWWVDQNRENIEKFKKQDPENNGVMKFEGVKEATVDELNHFYRDNRDNYADQSRFFDLIKKHFGNKALNPEELFELYFNGFYYQSSHRYIEDNEPAQNNLFSKVLENNKLLNPERSYGIDGFSNNVINALKSHKVLGLVHTTPLRYRHIISMWGADIDQDGKVKAIYVTDSDDREITFNDNSKRRIGMIRYDVLVDDNGNIRFTGKGATHKEEGAIYAGLYSLSRGDEVWEDYFKKYPEVQENL

SEQ ID NO: 399 - protein, 318 aa, synthetic construct
  VARIANT 1: note = M or absent or a signal peptide linked via a peptide bond
XTALGRRKAEDRIKETLWADGVKIDEKDFEHIKSSHEDYFAVEYGKGSGYYDVNKKMDSEDTALCVGAVVTNMFHWWVDQNRENIEKFKKQDPENNGVMKFEGVKEATVDELNHFYRDNRDNYADQSRFFDLIKKHFGNKALNPEELFELYFNGFYYQSSHRYIEDNEPAQNNLFSKVLENNKLLNPERSYGIDGFSNNVINALKSHKVLGLVYTTPLTYRHIISMWGADIDQDGKVKAIYVTDSDDREITFNDNSKRRIGMIRYDVLVDDNGNIRFTGKGATHKEEGAIYAGLYSLSRGDEVWEDYFKKYPEVQENL

SEQ ID NO: 400 - protein, 318 aa, synthetic construct
  VARIANT 1: note = M or absent or a signal peptide linked via a peptide bond
XTALGRRKAEDRIKETLWADGVKIDEKDFEHIKSSHEDYFAVEYGKGSGYYDVNKKMDSEDSALCVGAVVTNMFHWWVDQNRENIEKFKKQDPENNGVMKFEGVKEATVDELNHFYRDNRDNYADQSRFFDLIKKHFGNKALNPEELFELYFNGFYYQSSHRYIEDNEPAQNNLFSKVLENNKLLNPERSYGIDGFSNNVINALKSHKVLGLVHTTPLTYRHIISMWGADIDQDGKVKAIYVTDSDDREITFNDNSKRRIGMIRYDVLVDDNGNIRFTGKGATHKEEGAIYAGLYSLSRGDEVWEDYFKKYPEVQENL

SEQ ID NO: 401 - protein, 318 aa, synthetic construct
  VARIANT 1: note = M or absent or a signal peptide linked via a peptide bond
XTALGRRKAEDRIKETLWADGVKIDEKDFEHIKSSHEDYFAVEYGKGSGYYDVNKKMDSEDSALCVGAVVTNMFHWWVDQNRENIEKFKKQDPENNGVMKFEGVKEATVDELNHFYRDNRDNYADQSRFFDLIKKHFGNKALNPEELFELYFNGFYYQSSHRYIEDNEPAQNNLFSKVLENNKLLNPERSYGIDGFSNNVINALKSHKVLGLVYTTPLRYRHIISMWGADIDQDGKVKAIYVTDSDDREITFNDNSKRRIGMIRYDVLVDDNGNIRFTGKGATHKEEGAIYAGLYSLSRGDEVWEDYFKKYPEVQENL

SEQ ID NO: 402 - protein, 318 aa, synthetic construct
  VARIANT 1: note = M or absent or a signal peptide linked via a peptide bond
XTALGRRKAEDRIKETLWADGVKIDEKDFEHIKSSHEDYFAVEYGKGSGYYDVNKKMDSEDTALCVGAVVTNMFHWWVDQNRENIEKFKKQDPENNGVMKFEGVKEATVDELNHFYRDNRDNYADQSRFFDLIKKHFGNKALNPEELFELYFNGFYYQSSHRYIEDNEPAQNNLFSKVLENNKLLNPERSYGIDGFSNNVINALKSHKVLGLVYTTPLRYRHIISMWGADIDQDGKVKAIYVTDSDDREITFNDNSSRRIGMIRYDVLVDDNGNIRFTGKGATHKEEGAIYAGLYSLSRGDEVWEDYFKKYPEVQENL

SEQ ID NO: 403 - protein, 318 aa, synthetic construct
  VARIANT 1: note = M or absent or a signal peptide linked via a peptide bond
XTALGRRKAEDRIKETLWADGVKIDEKDFEHIKSSHEDYFAVEYGKGSGYYDVNKKMDSEDTALCVGAVVTNMFHWWVDQNRENIEKFKKQDPENNGVMKFEGVKEATVDELNHFYRDNRDNYADQSRFFDLIKKHFGNKALNPEELFELYFNGFYYQSSHRYIEDNEPAQNNLFSKVLENNKLLNPERSYGIDGFSNNVINALKSHKVLGLVHTTPLRYRHIISMWGADIDQDGKVKAIYVTDSDDREITFNDNSSRRIGMIRYDVLVDDNGNIRFTGKGATHKEEGAIYAGLYSLSRGDEVWEDYFKKYPEVQENL

SEQ ID NO: 404 - protein, 318 aa, synthetic construct
  VARIANT 1: note = M or absent or a signal peptide linked via a peptide bond
XTALGRRKAEDRIKETLWADGVKIDEKDFEHIKSSHEDYFAVEYGKGSGYYDVNKKMDSEDTALCVGAVVTNMFHWWVDQNRENIEKFKKQDPENNGVMKFNGVKEATVDELNHFYRDNRDNYADQSRFFDLIKKHFGNKALNPEELFELYFNGFYYQSSHRYIEDNKPAQNNLFSKVLENNKLLNPERSYGIDGFSNNVINALKSHKVLGLVYTTPLRYRHIISMWGADIDQDGKVKAIYVTDSDDREITFNDNSKRRIGMIRYDVLVDDNGNIRFTGKGATHKEEGAIYAGLYSLSRGDEVWEDYFKKYPEVQENL

SEQ ID NO: 405 - protein, 318 aa, synthetic construct
  VARIANT 1: note = M or absent or a signal peptide linked via a peptide bond
XTALGRRKAEDRIKETLWADGVKIDEKDFEHIKSSHEDYFAVEYGKGSGYYDVNKKMDSEDSALCVGAVVTNMFHWWVDQNRENIEKFKKQDPENNGVMKFNGVKEATVDELNHFYRDNRDNYADQSRFFDLIKKHFGNKALNPEELFELYFNGFYYQSSHRYIEDNKPAQNNLFSKVLENNKLLNPERSYGIDGFSNNVINALKSHKVLGLVHTTPLRYRHIISMWGADIDQDGKVKAIYVTDSDDREITFNDNSKRRIGMIRYDVLVDDNGNIRFTGKGATHKEEGAIYAGLYSLSRGDEVWEDYFKKYPEVQENL

SEQ ID NO: 406 - protein, 318 aa, synthetic construct
  VARIANT 1: note = M or absent or a signal peptide linked via a peptide bond
XTALGRRKAEQRIKETLWADGVKIDEKDFEHIKSSHEDYFAVEYGKGSGYYDVNKKMDSEDTALCVGAVVTNMFHWWVDQNRENIEKFKKQDPENNGVMKFNGVKEATVDELNHFYRDNRDNYADQSRFFDLIKKHFGNKALNPEELFELYFNGFYYQSSHRYIEDNKPAQNNLFSKVLENNKLLNPERSYGIDGFSNNVINALKSHKVLGLVHTTPLRYRHIISMWGADIDQDGKVKAIYVTDSDDREITFNDNSKRRIGMIRYDVLVDDNGNIRFTGKGATHKEEGAIYAGLYSLSRGDEVWEDYFKKYPEVQENL

SEQ ID NO: 407 - protein, 318 aa, synthetic construct
  VARIANT 1: note = M or absent or a signal peptide linked via a peptide bond
XTALGRRKAEDRIKETLWADGVKIDEKDFEHIKSSHEDYFAVEYGKGSGYYDVNKKMDSEDTALCVGAVVTNMFHWWVDQNRENIEKFKKQDPENNGVMKFEGVKEATVDELNHFYRDNRDNYADQSRFFDLIKKHFGNKALNPEELFELYFNGFYYNSSHRYIEDNEPAQNNLFSKVLENNKLLNPERSYGIDGFSNNVINALKSHKVLGLVHTTPLRYRHIISMWGADIDQDGKVKAIYVTDSDDREITFNDNSKRRIGMIRYDVLVDDNGNIRFTGKGATHKEEGAIYAGLYSLSRGDEVWEDYFKKYPEVQENL

SEQ ID NO: 408 - protein, 318 aa, synthetic construct
  VARIANT 1: note = M or absent or a signal peptide linked via a peptide bond
XTALGRRKAEDRIKETLWADGVKIDEKDFEHIKSSHEDYFAVEYGKGSGYYDVNKKMDSEDTALCVGAVVTNMFHWWVDQNRENIEKFKKQDPENNGVMKFEGVKEATVDELNHFYRDNRDNYADQSRFFDLIKKHFGNKALNPEELFELYFNGFYYNSSHRYIEDNEPAQNNLFSKVLENNKLLNPERSYGIDGFSNNVINALKSHKVLGLVYTTPLRYRHIISMWGADIDQDGKVKAIYVTDSDDREITFNDNSKRRIGMIRYDVLVDDNGNIRFTGKGATHKEEGAIYAGLYSLSRGDEVWEDYFKKYPEVQENL

SEQ ID NO: 409 - protein, 318 aa, synthetic construct
  VARIANT 1: note = M or absent or a signal peptide linked via a peptide bond
XTALGRRKAEDRIKETLWADGVKIDEKDFEHIKSSHEDYFAVEYGKGSGYYDVNKKMDSEDSALCVGAVVTNMFHWWVDQNRENIEKFKKQDPENNGVMKFEGVKEATVDELNHFYRDNRDNYADQSRFFDLIKKHFGNKALNPEELFELYFNGFYYNSSHRYIEDNEPAQNNLFSKVLENNKLLNPERSYGIDGFSNNVINALKSHKVLGLVHTTPLRYRHIISMWGADIDQDGKVKAIYVTDSDDREITFNDNSKRRIGMIRYDVLVDDNGNIRFTGKGATHKEEGAIYAGLYSLSRGDEVWEDYFKKYPEVQENL

SEQ ID NO: 410 - protein, 318 aa, synthetic construct
  VARIANT 1: note = M or absent or a signal peptide linked via a peptide bond
XTALGRRKAEDRIKETLWADGVKIDEKDFEHIKSSHEDYFAVEYGKGSGYYDVNKKMDSEDTALCVGAVVTNMFHWWVDQNRENIEKFKKQDPENNGVMKFEGVKEATVDELNEFYRDNRDNYADQSRFFDLIKKHFPNKALNPEELFELYFNGFYYGSSHRYIEDNEPAQNNLFSKVLENNKLLNPERSYGIDGFSNNVINALKSHKVLGLVYTTPLRYRHIISMWGADIDQDGKVKAIYVTDSDDREITFNDNSKRRIGMIRYDVLVDDNGNIRFTGKGATHKEEGAIYAGLYSLSRGDEVWEDYFKKYPEVQENL

SEQ ID NO: 411 - protein, 318 aa, synthetic construct
  VARIANT 1: note = M or absent or a signal peptide linked via a peptide bond
XTALGRRKAEDRIKETLWADGVKIDEKDFEHIKSSHEDYFAVEYGKGSGYYDVNKKMDSEDTALCVGAVVTNMFHWWVDQNRENIEKFKKQDPENNGVMKFEGVKEATVDELNEFYRDNRDNYADQSRFFDLIKKHFPNKALNPEELFELYFNGFYYGSSHRYIEDNEPAQNNLFSKVLENNKLLNPERSYGIDGFSNNVKNALKSHKVLGLVYTTPLRYRHIISMWGADIDQDGKVKAIYVTDSDDREITFNDNSKRRIGMIRYDVLVDDNGNIRFTGKGATHKEEGAIYAGLYSLSRGDEVWEDYFKKYPEVQENL

SEQ ID NO: 412 - protein, 318 aa, synthetic construct
  VARIANT 1: note = M or absent or a signal peptide linked via a peptide bond
XTALGRRKAEDRIKETLWADGVKIDEKDFEHIKSSHEDYFAVEYGKGSGYYDVNKKMDSEDTALCVGAVVTNMFHWWVDQNRENIEKFKKQDPENNGVMKFEGVKEATVDELNEFYRDNRDNYADQSRFFDLIKKHFPNKALNPEELFELYFNGFYYGSSHRYIEDNEPAQNNLFSKVLENNKLLNPERSYGIDGFSNNVINALKSHKVLGLVYTTPLRYGHIISMWGADIDQDGKVKAIYVTDSDDREITFNDNSKRRIGMIRYDVLVDDNGNIRFTGKGATHKEEGAIYAGLYSLSRGDEVWEDYFKKYPEVQENL

SEQ ID NO: 413 - protein, 318 aa, synthetic construct
  VARIANT 1: note = M or absent or a signal peptide linked via a peptide bond
XTALGRRKAEDRIKETLWADGVKIDEKDFEHIDSSHEDYFAVEYGKGSGYYDVNKKMDSEDTALCVGAVVTNMFHWWVDQNRENIEKFKEQDPENNGVMKFEGVKEATVDELNEFYRDNRDNYADQSRFFDLIKKHFPNKALNPEELFELYFNGFYYGSSHRYIEDNEPAQNNLFSKVLENNKLLNPERSYGIDGFSNNVINALKSHKVLGLVYTTPLRYGHIISMWGADIDQDGKVKAIYVTDSDDREITFNDNSKRRIGMIRYDVLVDDNGNIRFTGKGATHKEEGAIYAGLYSLSRGDEVWEDYFKKYPEVQENL

SEQ ID NO: 414 - protein, 318 aa, synthetic construct
  VARIANT 1: note = M or absent or a signal peptide linked via a peptide bond
XTALGRRKAEDRIKETLWADGVKIDEKDFEHIKSSHEDYFAVEYGKGSGYYDVNKKMDSEDTALCVGAVVTNMFHWWVEQNRENIEKFKKQDPENNGVMKFEGVKEATVDELNEFYRDNRDNYADQSRFFDLIKKHFPNKALNPEELFELYFNGFYYGSSHRYIEDNEPAQNNLFSKVLDNNKLLNPERSYGIDGFSNNVINALKSHKVLGLVYTTPLRYGHIISMWGADIDQDGKVKAIYVTDSDDREITFNDNSKRRIGMIRYDVLVDDNGNIRFTGKGATHKEEGAIYAGLYSLSRGDEVWEDYFKKYPEVQENL

SEQ ID NO: 415 - protein, 318 aa, synthetic construct
  VARIANT 1: note = M or absent or a signal peptide linked via a peptide bond
XTALGRRKAEDRIKETLWADGVKIDEKDFEHIKSSHEDYFAVEYGKGSGYYDVNKKMDSEDTALCVGAVVTNMFHWWVDQNRENIEKFKKQDPENNGVMKFEGVKEATVDELNEFYRDNRDNYADQSRFFDLIKKHFPNKALNPEELFELYFNGFYYGSSHRYIEDNEPAQNNLFSKVLENNKLLNPERSYGIDGFSNNVINALKSHKVLGLVYTTPLRYGHIISMWGADIDQDGKVKAIYVTDSDDREITFNDNSKRRIGMIRYDVLVDDNGNIRFTGKGKTHKEEGAIYAGLYSLSLGDEVWEDYFKKYPEVQENL

SEQ ID NO: 416 - protein, 318 aa, synthetic construct
  VARIANT 1: note = M or absent or a signal peptide linked via a peptide bond
XTALGRRKAEDRIKETLWADGVKIDEKDFEHIKSSHEDYFAVEYGKGSGYYDVNKKMDSEDTALCVGAVVTNMFHWWVEQNRENIEKFKKQDPENNGVMKFEGVKEATVDELNEFYRDNRDNYADQSRFFDLIKKHFPNKALNPEELFELYFNGFYYGSSHRYIEDNEPAQNNLFSKVLDNNKLLNPERSYGIDGFSNNVINALKSHKVLGLVYTTPLRYGHIISMWGADIDQDGKVKAIYVTDSDDREITFNDNSKRRIGMIRYDVLVDDNGNIRFTGKGKTHKEEGAIYAGLYSLSLGDEVWEDYFKKYPEVQENL

SEQ ID NO: 417 - protein, 318 aa, synthetic construct
  VARIANT 1: note = M or absent or a signal peptide linked via a peptide bond
XTALGRRKAEDRIKETLWADGVKIDEKDFEHIDSSHEDYFAVEYGKGSGYYDVNKKMDSEDTALCVGAVVTNMFHWWVEQNRENIEKFKEQDPENNGVMKFEGVKEATVDELNEFYRDNRDNYADQSRFFDLIKKHFPNKALNPEELFELYFNGFYYGSSHRYIEDNEPAQNNLFSKVLDNNKLLNPERSYGIDGFSNNVINALKSHKVLGLVYTTPLRYGHIISMWGADIDQDGKVKAIYVTDSDDREITFNDNSKRRIGMIRYDVLVDDNGNIRFTGKGATHKEEGAIYAGLYSLSRGDEVWEDYFKKYPEVQENL

SEQ ID NO: 418 - protein, 318 aa, synthetic construct
  VARIANT 1: note = M or absent or a signal peptide linked via a peptide bond
XTALGRRKAEDRIKETLWADGVKIDEKDFEHIDSSHEDYFAVEYGKGSGYYDVNKKMDSEDTALCVGAVVTNMFHWWVDQNRENIEKFKEQDPENNGVMKFEGVKEATVDELNEFYRDNRDNYADQSRFFDLIKKHFPNKALNPEELFELYFNGFYYGSSHRYIEDNEPAQNNLFSKVLENNKLLNPERSYGIDGFSNNVINALKSHKVLGLVYTTPLRYGHIISMWGADIDQDGKVKAIYVTDSDDREITFNDNSKRRIGMIRYDVLVDDNGNIRFTGKGKTHKEEGAIYAGLYSLSLGDEVWEDYFKKYPEVQENL

SEQ ID NO: 419 - protein, 318 aa, synthetic construct
  VARIANT 1: note = M or absent or a signal peptide linked via a peptide bond
XTALGRRKAEDRIKETLWADGVKIDEKDFEHIKSSHEDYFAVEYGKGSGYYDVNKKMDSEDTALCVGAVVTNMFHWWVDQNRENIEKFKKQDPENNGVMKFEGVKEATVDELNEFYRDNRDNYADQSRFFDLIKKHFPNKALNPEELFELYFNGFYYGSSHRYIEDNEPAQNNLFSKVLENNKLLNPERSYGIDGFSNNVKNALKSHKVLGLVYTTPLRYGHIISMWGADIDQDGKVKAIYVTDSDDREITFNDNSKRRIGMIRYDVLVDDNGNIRFTGKGATHKEEGAIYAGLYSLSRGDEVWEDYFKKYPEVQENL

SEQ ID NO: 420 - protein, 318 aa, synthetic construct
  VARIANT 1: note = M or absent or a signal peptide linked via a peptide bond
XTALGRRKAEDRIKETLWADGVKIDEKDFEHIDSSHEDYFAVEYGKGSGYYDVNKKMDSEDTALCVGAVVTNMFHWWVDQNRENIEKFKEQDPENNGVMKFEGVKEATVDELNEFYRDNRDNYADQSRFFDLIKKHFPNKALNPEELFELYFNGFYYGSSHRYIEDNEPAQNNLFSKVLENNKLLNPERSYGIDGFSNNVKNALKSHKVLGLVYTTPLRYGHIISMWGADIDQDGKVKAIYVTDSDDREITFNDNSKRRIGMIRYDVLVDDNGNIRFTGKGATHKEEGAIYAGLYSLSRGDEVWEDYFKKYPEVQENL

SEQ ID NO: 421 - protein, 318 aa, synthetic construct
  VARIANT 1: note = M or absent or a signal peptide linked via a peptide bond
XTALGRRKAEDRIKETLWADGVKIDEKDFEHIKSSHEDYFAVEYGKGSGYYDVNKKMDSEDTALCVGAVVTNMFHWWVEQNRENIEKFKKQDPENNGVMKFEGVKEATVDELNEFYRDNRDNYADQSRFFDLIKKHFPNKALNPEELFELYFNGFYYGSSHRYIEDNEPAQNNLFSKVLDNNKLLNPERSYGIDGFSNNVKNALKSHKVLGLVYTTPLRYGHIISMWGADIDQDGKVKAIYVTDSDDREITFNDNSKRRIGMIRYDVLVDDNGNIRFTGKGATHKEEGAIYAGLYSLSRGDEVWEDYFKKYPEVQENL

SEQ ID NO: 422 - protein, 318 aa, synthetic construct
  VARIANT 1: note = M or absent or a signal peptide linked via a peptide bond
XTALGRRKAEDRIKETLWADGVKIDEKDFEHIKSSHEDYFAVEYGKGSGYYDVNKKMDSEDTALCVGAVVTNMFHWWVDQNRENIEKFKKQDPENNGVMKFEGVKEATVDELNEFYRDNRDNYADQSRFFDLIKKHFPNKALNPEELFELYFNGFYYGSSHRYIEDNEPAQNNLFSKVLENNKLLNPERSYGIDGFSNNVKNALKSHKVLGLVYTTPLRYGHIISMWGADIDQDGKVKAIYVTDSDDREITFNDNSKRRIGMIRYDVLVDDNGNIRFTGKGKTHKEEGAIYAGLYSLSLGDEVWEDYFKKYPEVQENL

SEQ ID NO: 423 - protein, 318 aa, synthetic construct
  VARIANT 1: note = M or absent or a signal peptide linked via a peptide bond
XTALGRRKAEDRIKETLWADGVKIDEKDFEHIKSSHEDYFAVEYGKGSGYYDVNKKMDSEDTALCVGAVVTNMFHWWVEQNRENIEKFKKQDPENNGVMKFEGVKEATVDELNEFYRDNRDNYADQSRFFDLIKKHFPNKALNPEELFELYFNGFYYGSSHRYIEDNEPAQNNLFSKVLDNNKLLNPERSYGIDGFSNNVKNALKSHKVLGLVYTTPLRYGHIISMWGADIDQDGKVKAIYVTDSDDREITFNDNSKRRIGMIRYDVLVDDNGNIRFTGKGKTHKEEGAIYAGLYSLSLGDEVWEDYFKKYPEVQENL

SEQ ID NO: 424 - protein, 318 aa, synthetic construct
  VARIANT 1: note = M or absent or a signal peptide linked via a peptide bond
XTALGRRKAEDRIKETLWADGVKIDEKDFEHIDSSHEDYFAVEYGKGSGYYDVNKKMDSEDTALCVGAVVTNMFHWWVEQNRENIEKFKEQDPENNGVMKFEGVKEATVDELNEFYRDNRDNYADQSRFFDLIKKHFPNKALNPEELFELYFNGFYYGSSHRYIEDNEPAQNNLFSKVLDNNKLLNPERSYGIDGFSNNVKNALKSHKVLGLVYTTPLRYGHIISMWGADIDQDGKVKAIYVTDSDDREITFNDNSKRRIGMIRYDVLVDDNGNIRFTGKGATHKEEGAIYAGLYSLSRGDEVWEDYFKKYPEVQENL

SEQ ID NO: 425 - protein, 318 aa, synthetic construct
  VARIANT 1: note = M or absent or a signal peptide linked via a peptide bond
XTALGRRKAEDRIKETLWADGVKIDEKDFEHIDSSHEDYFAVEYGKGSGYYDVNKKMDSEDTALCVGAVVTNMFHWWVDQNRENIEKFKEQDPENNGVMKFEGVKEATVDELNEFYRDNRDNYADQSRFFDLIKKHFPNKALNPEELFELYFNGFYYGSSHRYIEDNEPAQNNLFSKVLENNKLLNPERSYGIDGFSNNVKNALKSHKVLGLVYTTPLRYGHIISMWGADIDQDGKVKAIYVTDSDDREITFNDNSKRRIGMIRYDVLVDDNGNIRFTGKGKTHKEEGAIYAGLYSLSLGDEVWEDYFKKYPEVQENL

SEQ ID NO: 426 - protein, 318 aa, synthetic construct
  VARIANT 1: note = M or absent or a signal peptide linked via a peptide bond
XTALGRRKAEDRIKETLWADGVKIDEKDFEHIDSSHEDYFAVEYGKGSGYYDVNKKMDSEDTALCVGAVVTNMFHWWVEQNRENIEKFKEQDPENNGVMKFEGVKEATVDELNEFYRDNRDNYADQSRFFDLIKKHFPNKALNPEELFELYFNGFYYGSSHRYIEDNEPAQNNLFSKVLDNNKLLNPERSYGIDGFSNNVKNALKSHKVLGLVYTTPLRYGHIISMWGADIDQDGKVKAIYVTDPDDREITFNDNSKRRIGMIRYDVLVDDNGNIRFTGKGATHKEEGAIYAGLYSLSRGDEVWEDYFKKYPEVQENL

SEQ ID NO: 427 - protein, 318 aa, synthetic construct
  VARIANT 1: note = M or absent or a signal peptide linked via a peptide bond
XTALGRRKAEDRIKETLWADGVKIDEKDFEHIDSSHEDYFAVEYGKGSGYYDVNKKMDSEDTALCVGAVVTNMFHWWVDQNRENIEKFKEQDPENNGVMKFEGVKEATVDELNEFYRDNRDNYADQSRFFDLIKKHFPNKALNPEELFELYFNGFYYGSSHRYIEDNEPAQNNLFSKVLENNKLLNPERSYGIDGFSNNVKNALKSHKVLGLVYTTPLRYGHIISMWGADIDQDGKVKAIYVTDPDDREITFNDNSKRRIGMIRYDVLVDDNGNIRFTGKGKTHKEEGAIYAGLYSLSLGDEVWEDYFKKYPEVQENL

SEQ ID NO: 428 - protein, 318 aa, synthetic construct
  VARIANT 1: note = M or absent or a signal peptide linked via a peptide bond
XTALGRRKAEDRIKETLWADGVKIDEKDFEHIDSSHEDYFAVEYGKGSGYYDVNKKMDSEDTALCVGAVVTNMFHWWVEQNRENIEKFKEQDPENNGVMKFEGVKEATVDELNEFYRDNRDNYADQSRFFDLIKKHFPNKALNPEELFELYFNGFYYGSSHRYIEDNEPAQNNLFSKVLDNNKLLNPERSYGIDGFSNNVKNALKSHKVLGLVYTTPLRYGHIISMWGADIDQDGKVKAIYVTDPDDREITFNDNSKRRIGMIRYDVLVDDNGNIRFTGKGKTHKEEGAIYAGLYSLSLGDEVWEDYFKKYPEVQENL

SEQ ID NO: 429 - protein, 318 aa, synthetic construct
  VARIANT 1: note = M or absent or a signal peptide linked via a peptide bond
XTALGRRKAEDRIKETLWADGVKIDEKDFEHIDSSHEDYFAVEYGKGSGYYDVNKKMDSEDTALCVGAVVTNMFHWWVDQNRENIEKFKEQDPENNGVMKFEGVKEATVDELNEFYRDNRDNYADQSRFFDLIKKHFPNKALNPEELFELYFNGFYYGSSHRYIEDNEPAQNNLFSKVLENNKLLNPERSYGIDGFSNNVKNALKSHKVLGLVYTTPLRYGHIISMWGADIDQDGKVKAIYVTDSDDREITFNDNSKRRIGMIRYDVLVDDEGNIRFTGKGATHKEEGAIYAGLYSLSRGDEVWEDYFKKYPEVQENL

SEQ ID NO: 430 - protein, 318 aa, synthetic construct
  VARIANT 1: note = M or absent or a signal peptide linked via a peptide bond
XTALGRRKAEDRIKETLWADGVKIDEKDFEHIDSSHEDYFAVEYGKGSGYYDVNKKMDSEDTALCVGAVVTNMFHWWVEQNRENIEKFKEQDPENNGVMKFEGVKEATVDELNEFYRDNRDNYADQSRFFDLIKKHFPNKALNPEELFELYFNGFYYGSSHRYIEDNEPAQNNLFSKVLDNNKLLNPERSYGIDGFSNNVKNALKSHKVLGLVYTTPLRYGHIISMWGADIDQDGKVKAIYVTDSDDREITFNDNSKRRIGMIRYDVLVDDEGNIRFTGKGATHKEEGAIYAGLYSLSRGDEVWEDYFKKYPEVQENL

SEQ ID NO: 431 - protein, 318 aa, synthetic construct
  VARIANT 1: note = M or absent or a signal peptide linked via a peptide bond
XTALGRRKAEDRIKETLWADGVKIDEKDFEHIDSSHEDYFAVEYGKGSGYYDVNKKMDSEDTALCVGAVVTNMFHWWVEQNRENIEKFKEQDPENNGVMKFEGVKEATVDELNEFYRDNRDNYADQSRFFDLIKKHFPNKALNPEELFELYFNGFYYGSSHRYIEDNEPAQNNLFSKVLDNNKLLNPERSYGIDGFSNNVKNALKSHKVLGLVYTTPLRYGHIISMWGADIDQDGKVKAIYVTDSDDREITFNDNSKRRIGMIRYDVLVDDEGNIRFTGKGKTHKEEGAIYAGLYSLSLGDEVWEDYFKKYPEVQENL

SEQ ID NO: 432 - protein, 318 aa, synthetic construct
  VARIANT 1: note = M or absent or a signal peptide linked via a peptide bond
XTALGRRKAEDRIKETLWADGVKIDEKDFEHIDSSHEDYFAVEYGKGSGYYDVNKKMDSEDTALCVGAVVTNMFHWWVEQNRENIEKFKEQDPENNGVMKFEGVKEATVDELNEFYRDNRDNYADQSRFFDLIKKHFPNKALNPEELFELYFNGFYYGSSHRYIEDNEPAQNNLFSKVLDNNKLLNPERSYGIDGFSNNVKNALKSHKVLGLVYTTPLRYGHIISMWGADIDQDGKVKAIYVTDPDDREITFNDNSKRRIGMIRYDVLVDDEGNIRFTGKGATHKEEGAIYAGLYSLSRGDEVWEDYFKKYPEVQENL

SEQ ID NO: 433 - protein, 318 aa, synthetic construct
  VARIANT 1: note = M or absent or a signal peptide linked via a peptide bond
XTALGRRKAEDRIKETLWADGVKIDEKDFEHIDSSHEDYFAVEYGKGSGYYDVNKKMDSEDTALCVGAVVTNMFHWWVDQNRENIEKFKEQDPENNGVMKFEGVKEATVDELNEFYRDNRDNYADQSRFFDLIKKHFPNKALNPEELFELYFNGFYYGSSHRYIEDNEPAQNNLFSKVLENNKLLNPERSYGIDGFSNNVKNALKSHKVLGLVYTTPLRYGHIISMWGADIDQDGKVKAIYVTDPDDREITFNDNSKRRIGMIRYDVLVDDEGNIRFTGKGKTHKEEGAIYAGLYSLSLGDEVWEDYFKKYPEVQENL

SEQ ID NO: 434 - protein, 318 aa, synthetic construct
  VARIANT 1: note = M or absent or a signal peptide linked via a peptide bond
XTALGRRKAEDRIKETLWADGVKIDEKDFEHIDSSHEDYFAVEYGKGSGYYDVNKKMDSEDTALCVGAVVTNMFHWWVEQNRENIEKFKEQDPENNGVMKFEGVKEATVDELNEFYRDNRDNYADQSRFFDLIKKHFPNKALNPEELFELYFNGFYYGSSHRYIEDNEPAQNNLFSKVLDNNKLLNPERSYGIDGFSNNVKNALKSHKVLGLVYTTPLRYGHIISMWGADIDQDGKVKAIYVTDPDDREITFNDNSKRRIGMIRYDVLVDDEGNIRFTGKGKTHKEEGAIYAGLYSLSLGDEVWEDYFKKYPEVQENL

SEQ ID NO: 435 - protein, 318 aa, synthetic construct
  VARIANT 1: note = M or absent or a signal peptide linked via a peptide bond
XTALGRRKAEDRIKETLWADGVKIDEKDFEHIKSSHEDYFAVEYGKGSGYYDVNKKMDSEDTALCVGAVVTNMFHWWVDQNRENIEKFKKQDPENNGVMKFEGVKEATVDELNEFYRDNRDNYADQSRFFDLIKKHFPNKALNPEELFELYFNGFYYGSSHRYIEDNEPAQNNLFSKVLENNKLLNPERSYGIDGFSNNVINALKSHKVLGLVYTTPLRSRHIISMWGADIDQDGKVKAIYVTDSDDREITFNDNSKRRIGMIRYDVLVDDNGNIRFTGKGATHKEEGAIYAGLYSLSRGDEVWEDYFKKYPEVQENL

SEQ ID NO: 436 - protein, 318 aa, synthetic construct
  VARIANT 1: note = M or absent or a signal peptide linked via a peptide bond
XTALGRRKAEDRIKETLWADGVKIDEKDFEHIDSSHEDYFAVEYGKGSGYYDVNKKMDSEDTALCVGAVVTNMFHWWVDQNRENIEKFKEQDPENNGVMKFEGVKEATVDELNEFYRDNRDNYADQSRFFDLIKKHFPNKALNPEELFELYFNGFYYGSSHRYIEDNEPAQNNLFSKVLENNKLLNPERSYGIDGFSNNVINALKSHKVLGLVYTTPLRSRHIISMWGADIDQDGKVKAIYVTDSDDREITFNDNSKRRIGMIRYDVLVDDNGNIRFTGKGATHKEEGAIYAGLYSLSRGDEVWEDYFKKYPEVQENL

SEQ ID NO: 437 - protein, 318 aa, synthetic construct
  VARIANT 1: note = M or absent or a signal peptide linked via a peptide bond
XTALGRRKAEDRIKETLWADGVKIDEKDFEHIKSSHEDYFAVEYGKGSGYYDVNKKMDSEDTALCVGAVVTNMFHWWVEQNRENIEKFKKQDPENNGVMKFEGVKEATVDELNEFYRDNRDNYADQSRFFDLIKKHFPNKALNPEELFELYFNGFYYGSSHRYIEDNEPAQNNLFSKVLDNNKLLNPERSYGIDGFSNNVINALKSHKVLGLVYTTPLRSRHIISMWGADIDQDGKVKAIYVTDSDDREITFNDNSKRRIGMIRYDVLVDDNGNIRFTGKGATHKEEGAIYAGLYSLSRGDEVWEDYFKKYPEVQENL

SEQ ID NO: 438 - protein, 318 aa, synthetic construct
  VARIANT 1: note = M or absent or a signal peptide linked via a peptide bond
XTALGRRKAEDRIKETLWADGVKIDEKDFEHIKSSHEDYFAVEYGKGSGYYDVNKKMDSEDTALCVGAVVTNMFHWWVDQNRENIEKFKKQDPENNGVMKFEGVKEATVDELNEFYRDNRDNYADQSRFFDLIKKHFPNKALNPEELFELYFNGFYYGSSHRYIEDNEPAQNNLFSKVLENNKLLNPERSYGIDGFSNNVINALKSHKVLGLVYTTPLRSRHIISMWGADIDQDGKVKAIYVTDSDDREITFNDNSKRRIGMIRYDVLVDDNGNIRFTGKGKTHKEEGAIYAGLYSLSLGDEVWEDYFKKYPEVQENL

SEQ ID NO: 439 - protein, 318 aa, synthetic construct
  VARIANT 1: note = M or absent or a signal peptide linked via a peptide bond
XTALGRRKAEDRIKETLWADGVKIDEKDFEHIKSSHEDYFAVEYGKGSGYYDVNKKMDSEDTALCVGAVVTNMFHWWVEQNRENIEKFKKQDPENNGVMKFEGVKEATVDELNEFYRDNRDNYADQSRFFDLIKKHFPNKALNPEELFELYFNGFYYGSSHRYIEDNEPAQNNLFSKVLDNNKLLNPERSYGIDGFSNNVINALKSHKVLGLVYTTPLRSRHIISMWGADIDQDGKVKAIYVTDSDDREITFNDNSKRRIGMIRYDVLVDDNGNIRFTGKGKTHKEEGAIYAGLYSLSLGDEVWEDYFKKYPEVQENL

SEQ ID NO: 440 - protein, 318 aa, synthetic construct
  VARIANT 1: note = M or absent or a signal peptide linked via a peptide bond
XTALGRRKAEDRIKETLWADGVKIDEKDFEHIDSSHEDYFAVEYGKGSGYYDVNKKMDSEDTALCVGAVVTNMFHWWVEQNRENIEKFKEQDPENNGVMKFEGVKEATVDELNEFYRDNRDNYADQSRFFDLIKKHFPNKALNPEELFELYFNGFYYGSSHRYIEDNEPAQNNLFSKVLDNNKLLNPERSYGIDGFSNNVINALKSHKVLGLVYTTPLRSRHIISMWGADIDQDGKVKAIYVTDSDDREITFNDNSKRRIGMIRYDVLVDDNGNIRFTGKGATHKEEGAIYAGLYSLSRGDEVWEDYFKKYPEVQENL

SEQ ID NO: 441 - protein, 318 aa, synthetic construct
  VARIANT 1: note = M or absent or a signal peptide linked via a peptide bond
XTALGRRKAEDRIKETLWADGVKIDEKDFEHIDSSHEDYFAVEYGKGSGYYDVNKKMDSEDTALCVGAVVTNMFHWWVDQNRENIEKFKEQDPENNGVMKFEGVKEATVDELNEFYRDNRDNYADQSRFFDLIKKHFPNKALNPEELFELYFNGFYYGSSHRYIEDNEPAQNNLFSKVLENNKLLNPERSYGIDGFSNNVINALKSHKVLGLVYTTPLRSRHIISMWGADIDQDGKVKAIYVTDSDDREITFNDNSKRRIGMIRYDVLVDDNGNIRFTGKGKTHKEEGAIYAGLYSLSLGDEVWEDYFKKYPEVQENL

SEQ ID NO: 442 - protein, 318 aa, synthetic construct
  VARIANT 1: note = M or absent or a signal peptide linked via a peptide bond
XTALGRRKAEDRIKETLWADGVKIDEKDFEHIKSSHEDYFAVEYGKGSGYYDVNKKMDSEDTALCVGAVVTNMFHWWVDQNRENIEKFKKQDPENNGVMKFEGVKEATVDELNEFYRDNRDNYADQSRFFDLIKKHFPNKALNPEELFELYFNGFYYGSSHRYIEDNEPAQNNLFSKVLENNKLLNPERSYGIDGFSNNVKNALKSHKVLGLVYTTPLRSRHIISMWGADIDQDGKVKAIYVTDSDDREITFNDNSKRRIGMIRYDVLVDDNGNIRFTGKGATHKEEGAIYAGLYSLSRGDEVWEDYFKKYPEVQENL

SEQ ID NO: 443 - protein, 318 aa, synthetic construct
  VARIANT 1: note = M or absent or a signal peptide linked via a peptide bond
XTALGRRKAEDRIKETLWADGVKIDEKDFEHIDSSHEDYFAVEYGKGSGYYDVNKKMDSEDTALCVGAVVTNMFHWWVDQNRENIEKFKEQDPENNGVMKFEGVKEATVDELNEFYRDNRDNYADQSRFFDLIKKHFPNKALNPEELFELYFNGFYYGSSHRYIEDNEPAQNNLFSKVLENNKLLNPERSYGIDGFSNNVKNALKSHKVLGLVYTTPLRSRHIISMWGADIDQDGKVKAIYVTDSDDREITFNDNSKRRIGMIRYDVLVDDNGNIRFTGKGATHKEEGAIYAGLYSLSRGDEVWEDYFKKYPEVQENL

SEQ ID NO: 444 - protein, 318 aa, synthetic construct
  VARIANT 1: note = M or absent or a signal peptide linked via a peptide bond
XTALGRRKAEDRIKETLWADGVKIDEKDFEHIKSSHEDYFAVEYGKGSGYYDVNKKMDSEDTALCVGAVVTNMFHWWVEQNRENIEKFKKQDPENNGVMKFEGVKEATVDELNEFYRDNRDNYADQSRFFDLIKKHFPNKALNPEELFELYFNGFYYGSSHRYIEDNEPAQNNLFSKVLDNNKLLNPERSYGIDGFSNNVKNALKSHKVLGLVYTTPLRSRHIISMWGADIDQDGKVKAIYVTDSDDREITFNDNSKRRIGMIRYDVLVDDNGNIRFTGKGATHKEEGAIYAGLYSLSRGDEVWEDYFKKYPEVQENL

SEQ ID NO: 445 - protein, 318 aa, synthetic construct
  VARIANT 1: note = M or absent or a signal peptide linked via a peptide bond
XTALGRRKAEDRIKETLWADGVKIDEKDFEHIKSSHEDYFAVEYGKGSGYYDVNKKMDSEDTALCVGAVVTNMFHWWVDQNRENIEKFKKQDPENNGVMKFEGVKEATVDELNEFYRDNRDNYADQSRFFDLIKKHFPNKALNPEELFELYFNGFYYGSSHRYIEDNEPAQNNLFSKVLENNKLLNPERSYGIDGFSNNVKNALKSHKVLGLVYTTPLRSRHIISMWGADIDQDGKVKAIYVTDSDDREITFNDNSKRRIGMIRYDVLVDDNGNIRFTGKGKTHKEEGAIYAGLYSLSLGDEVWEDYFKKYPEVQENL

SEQ ID NO: 446 - protein, 318 aa, synthetic construct
  VARIANT 1: note = M or absent or a signal peptide linked via a peptide bond
XTALGRRKAEDRIKETLWADGVKIDEKDFEHIKSSHEDYFAVEYGKGSGYYDVNKKMDSEDTALCVGAVVTNMFHWWVEQNRENIEKFKKQDPENNGVMKFEGVKEATVDELNEFYRDNRDNYADQSRFFDLIKKHFPNKALNPEELFELYFNGFYYGSSHRYIEDNEPAQNNLFSKVLDNNKLLNPERSYGIDGFSNNVKNALKSHKVLGLVYTTPLRSRHIISMWGADIDQDGKVKAIYVTDSDDREITFNDNSKRRIGMIRYDVLVDDNGNIRFTGKGKTHKEEGAIYAGLYSLSLGDEVWEDYFKKYPEVQENL

SEQ ID NO: 447 - protein, 318 aa, synthetic construct
  VARIANT 1: note = M or absent or a signal peptide linked via a peptide bond
XTALGRRKAEDRIKETLWADGVKIDEKDFEHIDSSHEDYFAVEYGKGSGYYDVNKKMDSEDTALCVGAVVTNMFHWWVEQNRENIEKFKEQDPENNGVMKFEGVKEATVDELNEFYRDNRDNYADQSRFFDLIKKHFPNKALNPEELFELYFNGFYYGSSHRYIEDNEPAQNNLFSKVLDNNKLLNPERSYGIDGFSNNVKNALKSHKVLGLVYTTPLRSRHIISMWGADIDQDGKVKAIYVTDSDDREITFNDNSKRRIGMIRYDVLVDDNGNIRFTGKGATHKEEGAIYAGLYSLSRGDEVWEDYFKKYPEVQENL

SEQ ID NO: 448 - protein, 318 aa, synthetic construct
  VARIANT 1: note = M or absent or a signal peptide linked via a peptide bond
XTALGRRKAEDRIKETLWADGVKIDEKDFEHIDSSHEDYFAVEYGKGSGYYDVNKKMDSEDTALCVGAVVTNMFHWWVDQNRENIEKFKEQDPENNGVMKFEGVKEATVDELNEFYRDNRDNYADQSRFFDLIKKHFPNKALNPEELFELYFNGFYYGSSHRYIEDNEPAQNNLFSKVLENNKLLNPERSYGIDGFSNNVKNALKSHKVLGLVYTTPLRSRHIISMWGADIDQDGKVKAIYVTDSDDREITFNDNSKRRIGMIRYDVLVDDNGNIRFTGKGKTHKEEGAIYAGLYSLSLGDEVWEDYFKKYPEVQENL

SEQ ID NO: 449 - protein, 318 aa, synthetic construct
  VARIANT 1: note = M or absent or a signal peptide linked via a peptide bond
XTALGRRKAEDRIKETLWADGVKIDEKDFEHIDSSHEDYFAVEYGKGSGYYDVNKKMDSEDTALCVGAVVTNMFHWWVEQNRENIEKFKEQDPENNGVMKFEGVKEATVDELNEFYRDNRDNYADQSRFFDLIKKHFPNKALNPEELFELYFNGFYYGSSHRYIEDNEPAQNNLFSKVLDNNKLLNPERSYGIDGFSNNVKNALKSHKVLGLVYTTPLRSRHIISMWGADIDQDGKVKAIYVTDPDDREITFNDNSKRRIGMIRYDVLVDDNGNIRFTGKGATHKEEGAIYAGLYSLSRGDEVWEDYFKKYPEVQENL

SEQ ID NO: 450 - protein, 318 aa, synthetic construct
  VARIANT 1: note = M or absent or a signal peptide linked via a peptide bond
XTALGRRKAEDRIKETLWADGVKIDEKDFEHIDSSHEDYFAVEYGKGSGYYDVNKKMDSEDTALCVGAVVTNMFHWWVDQNRENIEKFKEQDPENNGVMKFEGVKEATVDELNEFYRDNRDNYADQSRFFDLIKKHFPNKALNPEELFELYFNGFYYGSSHRYIEDNEPAQNNLFSKVLENNKLLNPERSYGIDGFSNNVKNALKSHKVLGLVYTTPLRSRHIISMWGADIDQDGKVKAIYVTDPDDREITFNDNSKRRIGMIRYDVLVDDNGNIRFTGKGKTHKEEGAIYAGLYSLSLGDEVWEDYFKKYPEVQENL

SEQ ID NO: 451 - protein, 318 aa, synthetic construct
  VARIANT 1: note = M or absent or a signal peptide linked via a peptide bond
XTALGRRKAEDRIKETLWADGVKIDEKDFEHIDSSHEDYFAVEYGKGSGYYDVNKKMDSEDTALCVGAVVTNMFHWWVEQNRENIEKFKEQDPENNGVMKFEGVKEATVDELNEFYRDNRDNYADQSRFFDLIKKHFPNKALNPEELFELYFNGFYYGSSHRYIEDNEPAQNNLFSKVLDNNKLLNPERSYGIDGFSNNVKNALKSHKVLGLVYTTPLRSRHIISMWGADIDQDGKVKAIYVTDPDDREITFNDNSKRRIGMIRYDVLVDDNGNIRFTGKGKTHKEEGAIYAGLYSLSLGDEVWEDYFKKYPEVQENL

SEQ ID NO: 452 - protein, 318 aa, synthetic construct
  VARIANT 1: note = M or absent or a signal peptide linked via a peptide bond
XTALGRRKAEDRIKETLWADGVKIDEKDFEHIDSSHEDYFAVEYGKGSGYYDVNKKMDSEDTALCVGAVVTNMFHWWVDQNRENIEKFKEQDPENNGVMKFEGVKEATVDELNEFYRDNRDNYADQSRFFDLIKKHFPNKALNPEELFELYFNGFYYGSSHRYIEDNEPAQNNLFSKVLENNKLLNPERSYGIDGFSNNVKNALKSHKVLGLVYTTPLRSRHIISMWGADIDQDGKVKAIYVTDSDDREITFNDNSKRRIGMIRYDVLVDDEGNIRFTGKGATHKEEGAIYAGLYSLSRGDEVWEDYFKKYPEVQENL

SEQ ID NO: 453 - protein, 318 aa, synthetic construct
  VARIANT 1: note = M or absent or a signal peptide linked via a peptide bond
XTALGRRKAEDRIKETLWADGVKIDEKDFEHIDSSHEDYFAVEYGKGSGYYDVNKKMDSEDTALCVGAVVTNMFHWWVEQNRENIEKFKEQDPENNGVMKFEGVKEATVDELNEFYRDNRDNYADQSRFFDLIKKHFPNKALNPEELFELYFNGFYYGSSHRYIEDNEPAQNNLFSKVLDNNKLLNPERSYGIDGFSNNVKNALKSHKVLGLVYTTPLRSRHIISMWGADIDQDGKVKAIYVTDSDDREITFNDNSKRRIGMIRYDVLVDDEGNIRFTGKGATHKEEGAIYAGLYSLSRGDEVWEDYFKKYPEVQENL

SEQ ID NO: 454 - protein, 318 aa, synthetic construct
  VARIANT 1: note = M or absent or a signal peptide linked via a peptide bond
XTALGRRKAEDRIKETLWADGVKIDEKDFEHIDSSHEDYFAVEYGKGSGYYDVNKKMDSEDTALCVGAVVTNMFHWWVEQNRENIEKFKEQDPENNGVMKFEGVKEATVDELNEFYRDNRDNYADQSRFFDLIKKHFPNKALNPEELFELYFNGFYYGSSHRYIEDNEPAQNNLFSKVLDNNKLLNPERSYGIDGFSNNVKNALKSHKVLGLVYTTPLRSRHIISMWGADIDQDGKVKAIYVTDSDDREITFNDNSKRRIGMIRYDVLVDDEGNIRFTGKGKTHKEEGAIYAGLYSLSLGDEVWEDYFKKYPEVQENL

SEQ ID NO: 455 - protein, 318 aa, synthetic construct
  VARIANT 1: note = M or absent or a signal peptide linked via a peptide bond
XTALGRRKAEDRIKETLWADGVKIDEKDFEHIDSSHEDYFAVEYGKGSGYYDVNKKMDSEDTALCVGAVVTNMFHWWVEQNRENIEKFKEQDPENNGVMKFEGVKEATVDELNEFYRDNRDNYADQSRFFDLIKKHFPNKALNPEELFELYFNGFYYGSSHRYIEDNEPAQNNLFSKVLDNNKLLNPERSYGIDGFSNNVKNALKSHKVLGLVYTTPLRSRHIISMWGADIDQDGKVKAIYVTDPDDREITFNDNSKRRIGMIRYDVLVDDEGNIRFTGKGATHKEEGAIYAGLYSLSRGDEVWEDYFKKYPEVQENL

SEQ ID NO: 456 - protein, 318 aa, synthetic construct
  VARIANT 1: note = M or absent or a signal peptide linked via a peptide bond
XTALGRRKAEDRIKETLWADGVKIDEKDFEHIDSSHEDYFAVEYGKGSGYYDVNKKMDSEDTALCVGAVVTNMFHWWVDQNRENIEKFKEQDPENNGVMKFEGVKEATVDELNEFYRDNRDNYADQSRFFDLIKKHFPNKALNPEELFELYFNGFYYGSSHRYIEDNEPAQNNLFSKVLENNKLLNPERSYGIDGFSNNVKNALKSHKVLGLVYTTPLRSRHIISMWGADIDQDGKVKAIYVTDPDDREITFNDNSKRRIGMIRYDVLVDDEGNIRFTGKGKTHKEEGAIYAGLYSLSLGDEVWEDYFKKYPEVQENL

SEQ ID NO: 457 - protein, 318 aa, synthetic construct
  VARIANT 1: note = M or absent or a signal peptide linked via a peptide bond
XTALGRRKAEDRIKETLWADGVKIDEKDFEHIDSSHEDYFAVEYGKGSGYYDVNKKMDSEDTALCVGAVVTNMFHWWVEQNRENIEKFKEQDPENNGVMKFEGVKEATVDELNEFYRDNRDNYADQSRFFDLIKKHFPNKALNPEELFELYFNGFYYGSSHRYIEDNEPAQNNLFSKVLDNNKLLNPERSYGIDGFSNNVKNALKSHKVLGLVYTTPLRSRHIISMWGADIDQDGKVKAIYVTDPDDREITFNDNSKRRIGMIRYDVLVDDEGNIRFTGKGKTHKEEGAIYAGLYSLSLGDEVWEDYFKKYPEVQENL

SEQ ID NO: 458 - protein, 318 aa, synthetic construct
  VARIANT 1: note = M or absent or a signal peptide linked via a peptide bond
XTALGRRKAEDRIKETLWADGVKIDEKDFEHIDSSHEDYFAVEYGKGSGYYDVNKKMDSEDTALCVGAVVTNMFHWWVDQNRENIEKFKEQDPENNGVMKFEGVKEATVDELNEFYRDNRDNYADQSRFFDLIKKHFPNKALNPEELFELYFNGFYYGSSHRYIEDNEPAQNNLFSKVLENNKLLNPERSYGIDGFSNNVKNALKSHKVLGLVYTTPLRYRHIISMWGADIDQDGKVKAIYVTDSDDREITFNDNSKRRIGMIRYDVLVDDNGNIRFTGKGATHKEEGAIYAGLYSLSRGDEVWEDYFKKYPEVQENL

SEQ ID NO: 459 - protein, 318 aa, synthetic construct
  VARIANT 1: note = M or absent or a signal peptide linked via a peptide bond
XTALGRRKAEDRIKETLWADGVKIDEKDFEHIKSSHEDYFAVEYGKGSGYYDVNKKMDSEDTALCVGAVVTNMFHWWVEQNRENIEKFKKQDPENNGVMKFEGVKEATVDELNEFYRDNRDNYADQSRFFDLIKKHFPNKALNPEELFELYFNGFYYGSSHRYIEDNEPAQNNLFSKVLDNNKLLNPERSYGIDGFSNNVKNALKSHKVLGLVYTTPLRYRHIISMWGADIDQDGKVKAIYVTDSDDREITFNDNSKRRIGMIRYDVLVDDNGNIRFTGKGATHKEEGAIYAGLYSLSRGDEVWEDYFKKYPEVQENL

SEQ ID NO: 460 - protein, 318 aa, synthetic construct
  VARIANT 1: note = M or absent or a signal peptide linked via a peptide bond
XTALGRRKAEDRIKETLWADGVKIDEKDFEHIKSSHEDYFAVEYGKGSGYYDVNKKMDSEDTALCVGAVVTNMFHWWVDQNRENIEKFKKQDPENNGVMKFEGVKEATVDELNEFYRDNRDNYADQSRFFDLIKKHFPNKALNPEELFELYFNGFYYGSSHRYIEDNEPAQNNLFSKVLENNKLLNPERSYGIDGFSNNVKNALKSHKVLGLVYTTPLRYRHIISMWGADIDQDGKVKAIYVTDSDDREITFNDNSKRRIGMIRYDVLVDDNGNIRFTGKGKTHKEEGAIYAGLYSLSLGDEVWEDYFKKYPEVQENL

SEQ ID NO: 461 - protein, 318 aa, synthetic construct
  VARIANT 1: note = M or absent or a signal peptide linked via a peptide bond
XTALGRRKAEDRIKETLWADGVKIDEKDFEHIKSSHEDYFAVEYGKGSGYYDVNKKMDSEDTALCVGAVVTNMFHWWVEQNRENIEKFKKQDPENNGVMKFEGVKEATVDELNEFYRDNRDNYADQSRFFDLIKKHFPNKALNPEELFELYFNGFYYGSSHRYIEDNEPAQNNLFSKVLDNNKLLNPERSYGIDGFSNNVKNALKSHKVLGLVYTTPLRYRHIISMWGADIDQDGKVKAIYVTDSDDREITFNDNSKRRIGMIRYDVLVDDNGNIRFTGKGKTHKEEGAIYAGLYSLSLGDEVWEDYFKKYPEVQENL

SEQ ID NO: 462 - protein, 318 aa, synthetic construct
  VARIANT 1: note = M or absent or a signal peptide linked via a peptide bond
XTALGRRKAEDRIKETLWADGVKIDEKDFEHIDSSHEDYFAVEYGKGSGYYDVNKKMDSEDTALCVGAVVTNMFHWWVEQNRENIEKFKEQDPENNGVMKFEGVKEATVDELNEFYRDNRDNYADQSRFFDLIKKHFPNKALNPEELFELYFNGFYYGSSHRYIEDNEPAQNNLFSKVLDNNKLLNPERSYGIDGFSNNVKNALKSHKVLGLVYTTPLRYRHIISMWGADIDQDGKVKAIYVTDSDDREITFNDNSKRRIGMIRYDVLVDDNGNIRFTGKGATHKEEGAIYAGLYSLSRGDEVWEDYFKKYPEVQENL

SEQ ID NO: 463 - protein, 318 aa, synthetic construct
  VARIANT 1: note = M or absent or a signal peptide linked via a peptide bond
XTALGRRKAEDRIKETLWADGVKIDEKDFEHIDSSHEDYFAVEYGKGSGYYDVNKKMDSEDTALCVGAVVTNMFHWWVDQNRENIEKFKEQDPENNGVMKFEGVKEATVDELNEFYRDNRDNYADQSRFFDLIKKHFPNKALNPEELFELYFNGFYYGSSHRYIEDNEPAQNNLFSKVLENNKLLNPERSYGIDGFSNNVKNALKSHKVLGLVYTTPLRYRHIISMWGADIDQDGKVKAIYVTDSDDREITFNDNSKRRIGMIRYDVLVDDNGNIRFTGKGKTHKEEGAIYAGLYSLSLGDEVWEDYFKKYPEVQENL

SEQ ID NO: 464 - protein, 318 aa, synthetic construct
  VARIANT 1: note = M or absent or a signal peptide linked via a peptide bond
XTALGRRKAEDRIKETLWADGVKIDEKDFEHIDSSHEDYFAVEYGKGSGYYDVNKKMDSEDTALCVGAVVTNMFHWWVEQNRENIEKFKEQDPENNGVMKFEGVKEATVDELNEFYRDNRDNYADQSRFFDLIKKHFPNKALNPEELFELYFNGFYYGSSHRYIEDNEPAQNNLFSKVLDNNKLLNPERSYGIDGFSNNVKNALKSHKVLGLVYTTPLRYRHIISMWGADIDQDGKVKAIYVTDPDDREITFNDNSKRRIGMIRYDVLVDDNGNIRFTGKGATHKEEGAIYAGLYSLSRGDEVWEDYFKKYPEVQENL

SEQ ID NO: 465 - protein, 318 aa, synthetic construct
  VARIANT 1: note = M or absent or a signal peptide linked via a peptide bond
XTALGRRKAEDRIKETLWADGVKIDEKDFEHIDSSHEDYFAVEYGKGSGYYDVNKKMDSEDTALCVGAVVTNMFHWWVDQNRENIEKFKEQDPENNGVMKFEGVKEATVDELNEFYRDNRDNYADQSRFFDLIKKHFPNKALNPEELFELYFNGFYYGSSHRYIEDNEPAQNNLFSKVLENNKLLNPERSYGIDGFSNNVKNALKSHKVLGLVYTTPLRYRHIISMWGADIDQDGKVKAIYVTDPDDREITFNDNSKRRIGMIRYDVLVDDNGNIRFTGKGKTHKEEGAIYAGLYSLSLGDEVWEDYFKKYPEVQENL

SEQ ID NO: 466 - protein, 318 aa, synthetic construct
  VARIANT 1: note = M or absent or a signal peptide linked via a peptide bond
XTALGRRKAEDRIKETLWADGVKIDEKDFEHIDSSHEDYFAVEYGKGSGYYDVNKKMDSEDTALCVGAVVTNMFHWWVEQNRENIEKFKEQDPENNGVMKFEGVKEATVDELNEFYRDNRDNYADQSRFFDLIKKHFPNKALNPEELFELYFNGFYYGSSHRYIEDNEPAQNNLFSKVLDNNKLLNPERSYGIDGFSNNVKNALKSHKVLGLVYTTPLRYRHIISMWGADIDQDGKVKAIYVTDPDDREITFNDNSKRRIGMIRYDVLVDDNGNIRFTGKGKTHKEEGAIYAGLYSLSLGDEVWEDYFKKYPEVQENL

SEQ ID NO: 467 - protein, 318 aa, synthetic construct
  VARIANT 1: note = M or absent or a signal peptide linked via a peptide bond
XTALGRRKAEDRIKETLWADGVKIDEKDFEHIDSSHEDYFAVEYGKGSGYYDVNKKMDSEDTALCVGAVVTNMFHWWVDQNRENIEKFKEQDPENNGVMKFEGVKEATVDELNEFYRDNRDNYADQSRFFDLIKKHFPNKALNPEELFELYFNGFYYGSSHRYIEDNEPAQNNLFSKVLENNKLLNPERSYGIDGFSNNVKNALKSHKVLGLVYTTPLRYRHIISMWGADIDQDGKVKAIYVTDSDDREITFNDNSKRRIGMIRYDVLVDDEGNIRFTGKGATHKEEGAIYAGLYSLSRGDEVWEDYFKKYPEVQENL

SEQ ID NO: 468 - protein, 318 aa, synthetic construct
  VARIANT 1: note = M or absent or a signal peptide linked via a peptide bond
XTALGRRKAEDRIKETLWADGVKIDEKDFEHIDSSHEDYFAVEYGKGSGYYDVNKKMDSEDTALCVGAVVTNMFHWWVEQNRENIEKFKEQDPENNGVMKFEGVKEATVDELNEFYRDNRDNYADQSRFFDLIKKHFPNKALNPEELFELYFNGFYYGSSHRYIEDNEPAQNNLFSKVLDNNKLLNPERSYGIDGFSNNVKNALKSHKVLGLVYTTPLRYRHIISMWGADIDQDGKVKAIYVTDSDDREITFNDNSKRRIGMIRYDVLVDDEGNIRFTGKGATHKEEGAIYAGLYSLSRGDEVWEDYFKKYPEVQENL

SEQ ID NO: 469 - protein, 318 aa, synthetic construct
  VARIANT 1: note = M or absent or a signal peptide linked via a peptide bond
XTALGRRKAEDRIKETLWADGVKIDEKDFEHIDSSHEDYFAVEYGKGSGYYDVNKKMDSEDTALCVGAVVTNMFHWWVEQNRENIEKFKEQDPENNGVMKFEGVKEATVDELNEFYRDNRDNYADQSRFFDLIKKHFPNKALNPEELFELYFNGFYYGSSHRYIEDNEPAQNNLFSKVLDNNKLLNPERSYGIDGFSNNVKNALKSHKVLGLVYTTPLRYRHIISMWGADIDQDGKVKAIYVTDSDDREITFNDNSKRRIGMIRYDVLVDDEGNIRFTGKGKTHKEEGAIYAGLYSLSLGDEVWEDYFKKYPEVQENL

SEQ ID NO: 470 - protein, 318 aa, synthetic construct
  VARIANT 1: note = M or absent or a signal peptide linked via a peptide bond
XTALGRRKAEDRIKETLWADGVKIDEKDFEHIDSSHEDYFAVEYGKGSGYYDVNKKMDSEDTALCVGAVVTNMFHWWVEQNRENIEKFKEQDPENNGVMKFEGVKEATVDELNEFYRDNRDNYADQSRFFDLIKKHFPNKALNPEELFELYFNGFYYGSSHRYIEDNEPAQNNLFSKVLDNNKLLNPERSYGIDGFSNNVKNALKSHKVLGLVYTTPLRYRHIISMWGADIDQDGKVKAIYVTDPDDREITFNDNSKRRIGMIRYDVLVDDEGNIRFTGKGATHKEEGAIYAGLYSLSRGDEVWEDYFKKYPEVQENL

SEQ ID NO: 471 - protein, 318 aa, synthetic construct
  VARIANT 1: note = M or absent or a signal peptide linked via a peptide bond
XTALGRRKAEDRIKETLWADGVKIDEKDFEHIDSSHEDYFAVEYGKGSGYYDVNKKMDSEDTALCVGAVVTNMFHWWVDQNRENIEKFKEQDPENNGVMKFEGVKEATVDELNEFYRDNRDNYADQSRFFDLIKKHFPNKALNPEELFELYFNGFYYGSSHRYIEDNEPAQNNLFSKVLENNKLLNPERSYGIDGFSNNVKNALKSHKVLGLVYTTPLRYRHIISMWGADIDQDGKVKAIYVTDPDDREITFNDNSKRRIGMIRYDVLVDDEGNIRFTGKGKTHKEEGAIYAGLYSLSLGDEVWEDYFKKYPEVQENL

SEQ ID NO: 472 - protein, 318 aa, synthetic construct
  VARIANT 1: note = M or absent or a signal peptide linked via a peptide bond
XTALGRRKAEDRIKETLWADGVKIDEKDFEHIDSSHEDYFAVEYGKGSGYYDVNKKMDSEDTALCVGAVVTNMFHWWVEQNRENIEKFKEQDPENNGVMKFEGVKEATVDELNEFYRDNRDNYADQSRFFDLIKKHFPNKALNPEELFELYFNGFYYGSSHRYIEDNEPAQNNLFSKVLDNNKLLNPERSYGIDGFSNNVKNALKSHKVLGLVYTTPLRYRHIISMWGADIDQDGKVKAIYVTDPDDREITFNDNSKRRIGMIRYDVLVDDEGNIRFTGKGKTHKEEGAIYAGLYSLSLGDEVWEDYFKKYPEVQENL

SEQ ID NO: 473 - protein, 318 aa, synthetic construct
  VARIANT 1: note = M or absent or a signal peptide linked via a peptide bond
XTALGRRKAEDRIKETLWADGVKIDEKDFEHIKSSHEDYFAVEYGKGSGYYDVNKKMDSEDTALCVGAVVTNMFHWWVDQNRENIEKFKKQDPENNGVMKFEGVKEATVDELNEFYRDNRDNYADQSRFFDLIKKDFGNKALNPEELFELYFNGFYYGSSHRYIEDNEPAQNNLFSKVLENNKLLNPERSYGIDGFSNNVKNALKSHKVLGLVYTTPLRYRHIISMWGADIDQDGKVKAIYVTDSDDREITFNDNSKRRIGMIRYDVLVDDNGNIRFTGKGATHKEEGAIYAGLYSLSRGDEVWEDYFKKYPEVQENL

SEQ ID NO: 474 - protein, 318 aa, synthetic construct
  VARIANT 1: note = M or absent or a signal peptide linked via a peptide bond
XTALGRRKAEDRIKETLWADGVKIDEKDFEHIDSSHEDYFAVEYGKGSGYYDVNKKMDSEDTALCVGAVVTNMFHWWVDQNRENIEKFKEQDPENNGVMKFEGVKEATVDELNEFYRDNRDNYADQSRFFDLIKKDFGNKALNPEELFELYFNGFYYGSSHRYIEDNEPAQNNLFSKVLENNKLLNPERSYGIDGFSNNVKNALKSHKVLGLVYTTPLRYRHIISMWGADIDQDGKVKAIYVTDSDDREITFNDNSKRRIGMIRYDVLVDDNGNIRFTGKGATHKEEGAIYAGLYSLSRGDEVWEDYFKKYPEVQENL

SEQ ID NO: 475 - protein, 318 aa, synthetic construct
  VARIANT 1: note = M or absent or a signal peptide linked via a peptide bond
XTALGRRKAEDRIKETLWADGVKIDEKDFEHIKSSHEDYFAVEYGKGSGYYDVNKKMDSEDTALCVGAVVTNMFHWWVEQNRENIEKFKKQDPENNGVMKFEGVKEATVDELNEFYRDNRDNYADQSRFFDLIKKDFGNKALNPEELFELYFNGFYYGSSHRYIEDNEPAQNNLFSKVLDNNKLLNPERSYGIDGFSNNVKNALKSHKVLGLVYTTPLRYRHIISMWGADIDQDGKVKAIYVTDSDDREITFNDNSKRRIGMIRYDVLVDDNGNIRFTGKGATHKEEGAIYAGLYSLSRGDEVWEDYFKKYPEVQENL

SEQ ID NO: 476 - protein, 318 aa, synthetic construct
  VARIANT 1: note = M or absent or a signal peptide linked via a peptide bond
XTALGRRKAEDRIKETLWADGVKIDEKDFEHIKSSHEDYFAVEYGKGSGYYDVNKKMDSEDTALCVGAVVTNMFHWWVDQNRENIEKFKKQDPENNGVMKFEGVKEATVDELNEFYRDNRDNYADQSRFFDLIKKDFGNKALNPEELFELYFNGFYYGSSHRYIEDNEPAQNNLFSKVLENNKLLNPERSYGIDGFSNNVKNALKSHKVLGLVYTTPLRYRHIISMWGADIDQDGKVKAIYVTDSDDREITFNDNSKRRIGMIRYDVLVDDNGNIRFTGKGKTHKEEGAIYAGLYSLSLGDEVWEDYFKKYPEVQENL

SEQ ID NO: 477 - protein, 318 aa, synthetic construct
  VARIANT 1: note = M or absent or a signal peptide linked via a peptide bond
XTALGRRKAEDRIKETLWADGVKIDEKDFEHIKSSHEDYFAVEYGKGSGYYDVNKKMDSEDTALCVGAVVTNMFHWWVEQNRENIEKFKKQDPENNGVMKFEGVKEATVDELNEFYRDNRDNYADQSRFFDLIKKDFGNKALNPEELFELYFNGFYYGSSHRYIEDNEPAQNNLFSKVLDNNKLLNPERSYGIDGFSNNVKNALKSHKVLGLVYTTPLRYRHIISMWGADIDQDGKVKAIYVTDSDDREITFNDNSKRRIGMIRYDVLVDDNGNIRFTGKGKTHKEEGAIYAGLYSLSLGDEVWEDYFKKYPEVQENL

SEQ ID NO: 478 - protein, 318 aa, synthetic construct
  VARIANT 1: note = M or absent or a signal peptide linked via a peptide bond
XTALGRRKAEDRIKETLWADGVKIDEKDFEHIDSSHEDYFAVEYGKGSGYYDVNKKMDSEDTALCVGAVVTNMFHWWVEQNRENIEKFKEQDPENNGVMKFEGVKEATVDELNEFYRDNRDNYADQSRFFDLIKKDFGNKALNPEELFELYFNGFYYGSSHRYIEDNEPAQNNLFSKVLDNNKLLNPERSYGIDGFSNNVKNALKSHKVLGLVYTTPLRYRHIISMWGADIDQDGKVKAIYVTDSDDREITFNDNSKRRIGMIRYDVLVDDNGNIRFTGKGATHKEEGAIYAGLYSLSRGDEVWEDYFKKYPEVQENL

SEQ ID NO: 479 - protein, 318 aa, synthetic construct
  VARIANT 1: note = M or absent or a signal peptide linked via a peptide bond
XTALGRRKAEDRIKETLWADGVKIDEKDFEHIDSSHEDYFAVEYGKGSGYYDVNKKMDSEDTALCVGAVVTNMFHWWVDQNRENIEKFKEQDPENNGVMKFEGVKEATVDELNEFYRDNRDNYADQSRFFDLIKKDFGNKALNPEELFELYFNGFYYGSSHRYIEDNEPAQNNLFSKVLENNKLLNPERSYGIDGFSNNVKNALKSHKVLGLVYTTPLRYRHIISMWGADIDQDGKVKAIYVTDSDDREITFNDNSKRRIGMIRYDVLVDDNGNIRFTGKGKTHKEEGAIYAGLYSLSLGDEVWEDYFKKYPEVQENL

SEQ ID NO: 480 - protein, 318 aa, synthetic construct
  VARIANT 1: note = M or absent or a signal peptide linked via a peptide bond
XTALGRRKAEDRIKETLWADGVKIDEKDFEHIDSSHEDYFAVEYGKGSGYYDVNKKMDSEDTALCVGAVVTNMFHWWVEQNRENIEKFKEQDPENNGVMKFEGVKEATVDELNEFYRDNRDNYADQSRFFDLIKKDFGNKALNPEELFELYFNGFYYGSSHRYIEDNEPAQNNLFSKVLDNNKLLNPERSYGIDGFSNNVKNALKSHKVLGLVYTTPLRYRHIISMWGADIDQDGKVKAIYVTDPDDREITFNDNSKRRIGMIRYDVLVDDNGNIRFTGKGATHKEEGAIYAGLYSLSRGDEVWEDYFKKYPEVQENL

SEQ ID NO: 481 - protein, 318 aa, synthetic construct
  VARIANT 1: note = M or absent or a signal peptide linked via a peptide bond
XTALGRRKAEDRIKETLWADGVKIDEKDFEHIDSSHEDYFAVEYGKGSGYYDVNKKMDSEDTALCVGAVVTNMFHWWVDQNRENIEKFKEQDPENNGVMKFEGVKEATVDELNEFYRDNRDNYADQSRFFDLIKKDFGNKALNPEELFELYFNGFYYGSSHRYIEDNEPAQNNLFSKVLENNKLLNPERSYGIDGFSNNVKNALKSHKVLGLVYTTPLRYRHIISMWGADIDQDGKVKAIYVTDPDDREITFNDNSKRRIGMIRYDVLVDDNGNIRFTGKGKTHKEEGAIYAGLYSLSLGDEVWEDYFKKYPEVQENL

SEQ ID NO: 482 - protein, 318 aa, synthetic construct
  VARIANT 1: note = M or absent or a signal peptide linked via a peptide bond
XTALGRRKAEDRIKETLWADGVKIDEKDFEHIDSSHEDYFAVEYGKGSGYYDVNKKMDSEDTALCVGAVVTNMFHWWVEQNRENIEKFKEQDPENNGVMKFEGVKEATVDELNEFYRDNRDNYADQSRFFDLIKKDFGNKALNPEELFELYFNGFYYGSSHRYIEDNEPAQNNLFSKVLDNNKLLNPERSYGIDGFSNNVKNALKSHKVLGLVYTTPLRYRHIISMWGADIDQDGKVKAIYVTDPDDREITFNDNSKRRIGMIRYDVLVDDNGNIRFTGKGKTHKEEGAIYAGLYSLSLGDEVWEDYFKKYPEVQENL

SEQ ID NO: 483 - protein, 318 aa, synthetic construct
  VARIANT 1: note = M or absent or a signal peptide linked via a peptide bond
XTALGRRKAEDRIKETLWADGVKIDEKDFEHIDSSHEDYFAVEYGKGSGYYDVNKKMDSEDTALCVGAVVTNMFHWWVDQNRENIEKFKEQDPENNGVMKFEGVKEATVDELNEFYRDNRDNYADQSRFFDLIKKDFGNKALNPEELFELYFNGFYYGSSHRYIEDNEPAQNNLFSKVLENNKLLNPERSYGIDGFSNNVKNALKSHKVLGLVYTTPLRYRHIISMWGADIDQDGKVKAIYVTDSDDREITFNDNSKRRIGMIRYDVLVDDEGNIRFTGKGATHKEEGAIYAGLYSLSRGDEVWEDYFKKYPEVQENL

SEQ ID NO: 484 - protein, 318 aa, synthetic construct
  VARIANT 1: note = M or absent or a signal peptide linked via a peptide bond
XTALGRRKAEDRIKETLWADGVKIDEKDFEHIDSSHEDYFAVEYGKGSGYYDVNKKMDSEDTALCVGAVVTNMFHWWVEQNRENIEKFKEQDPENNGVMKFEGVKEATVDELNEFYRDNRDNYADQSRFFDLIKKDFGNKALNPEELFELYFNGFYYGSSHRYIEDNEPAQNNLFSKVLDNNKLLNPERSYGIDGFSNNVKNALKSHKVLGLVYTTPLRYRHIISMWGADIDQDGKVKAIYVTDSDDREITFNDNSKRRIGMIRYDVLVDDEGNIRFTGKGATHKEEGAIYAGLYSLSRGDEVWEDYFKKYPEVQENL

SEQ ID NO: 485 - protein, 318 aa, synthetic construct
  VARIANT 1: note = M or absent or a signal peptide linked via a peptide bond
XTALGRRKAEDRIKETLWADGVKIDEKDFEHIDSSHEDYFAVEYGKGSGYYDVNKKMDSEDTALCVGAVVTNMFHWWVEQNRENIEKFKEQDPENNGVMKFEGVKEATVDELNEFYRDNRDNYADQSRFFDLIKKDFGNKALNPEELFELYFNGFYYGSSHRYIEDNEPAQNNLFSKVLDNNKLLNPERSYGIDGFSNNVKNALKSHKVLGLVYTTPLRYRHIISMWGADIDQDGKVKAIYVTDSDDREITFNDNSKRRIGMIRYDVLVDDEGNIRFTGKGKTHKEEGAIYAGLYSLSLGDEVWEDYFKKYPEVQENL

SEQ ID NO: 486 - protein, 318 aa, synthetic construct
  VARIANT 1: note = M or absent or a signal peptide linked via a peptide bond
XTALGRRKAEDRIKETLWADGVKIDEKDFEHIDSSHEDYFAVEYGKGSGYYDVNKKMDSEDTALCVGAVVTNMFHWWVEQNRENIEKFKEQDPENNGVMKFEGVKEATVDELNEFYRDNRDNYADQSRFFDLIKKDFGNKALNPEELFELYFNGFYYGSSHRYIEDNEPAQNNLFSKVLDNNKLLNPERSYGIDGFSNNVKNALKSHKVLGLVYTTPLRYRHIISMWGADIDQDGKVKAIYVTDPDDREITFNDNSKRRIGMIRYDVLVDDEGNIRFTGKGATHKEEGAIYAGLYSLSRGDEVWEDYFKKYPEVQENL

SEQ ID NO: 487 - protein, 318 aa, synthetic construct
  VARIANT 1: note = M or absent or a signal peptide linked via a peptide bond
XTALGRRKAEDRIKETLWADGVKIDEKDFEHIDSSHEDYFAVEYGKGSGYYDVNKKMDSEDTALCVGAVVTNMFHWWVDQNRENIEKFKEQDPENNGVMKFEGVKEATVDELNEFYRDNRDNYADQSRFFDLIKKDFGNKALNPEELFELYFNGFYYGSSHRYIEDNEPAQNNLFSKVLENNKLLNPERSYGIDGFSNNVKNALKSHKVLGLVYTTPLRYRHIISMWGADIDQDGKVKAIYVTDPDDREITFNDNSKRRIGMIRYDVLVDDEGNIRFTGKGKTHKEEGAIYAGLYSLSLGDEVWEDYFKKYPEVQENL

SEQ ID NO: 488 - protein, 318 aa, synthetic construct
  VARIANT 1: note = M or absent or a signal peptide linked via a peptide bond
XTALGRRKAEDRIKETLWADGVKIDEKDFEHIDSSHEDYFAVEYGKGSGYYDVNKKMDSEDTALCVGAVVTNMFHWWVEQNRENIEKFKEQDPENNGVMKFEGVKEATVDELNEFYRDNRDNYADQSRFFDLIKKDFGNKALNPEELFELYFNGFYYGSSHRYIEDNEPAQNNLFSKVLDNNKLLNPERSYGIDGFSNNVKNALKSHKVLGLVYTTPLRYRHIISMWGADIDQDGKVKAIYVTDPDDREITFNDNSKRRIGMIRYDVLVDDEGNIRFTGKGKTHKEEGAIYAGLYSLSLGDEVWEDYFKKYPEVQENL

SEQ ID NO: 489 - protein, 318 aa, synthetic construct
  VARIANT 1: note = M or absent or a signal peptide linked via a peptide bond
XTALGRRKAEDRIKETLWADGVKIDEKDFEHIDSSHEDYFAVEYGKGSGYYDVNKKMDSEDTALCVGAVVTNMFHWWVDQNRENIEKFKEQDPENNGVMKFEGVKEATVDELNEFYRDNRDNYADQSRFFDLIKKHFPNKALNPEELFELYFNGFYYGSSHRYIEDNEPAQNNLFSKVLENNKLLNPERSYGIDGFSNNVINALKSHKVLGLVYTTPLRYRHIISMWGADIDQDGKVKAIYVTDSDDREITFNDNSKRRIGMIRYDVLVDDNGNIRFTGKGATHKEEGAIYAGLYSLSRGDEVWEDYFKKYPEVQENL

SEQ ID NO: 490 - protein, 318 aa, synthetic construct
  VARIANT 1: note = M or absent or a signal peptide linked via a peptide bond
XTALGRRKAEDRIKETLWADGVKIDEKDFEHIKSSHEDYFAVEYGKGSGYYDVNKKMDSEDTALCVGAVVTNMFHWWVEQNRENIEKFKKQDPENNGVMKFEGVKEATVDELNEFYRDNRDNYADQSRFFDLIKKHFPNKALNPEELFELYFNGFYYGSSHRYIEDNEPAQNNLFSKVLDNNKLLNPERSYGIDGFSNNVINALKSHKVLGLVYTTPLRYRHIISMWGADIDQDGKVKAIYVTDSDDREITFNDNSKRRIGMIRYDVLVDDNGNIRFTGKGATHKEEGAIYAGLYSLSRGDEVWEDYFKKYPEVQENL

SEQ ID NO: 491 - protein, 318 aa, synthetic construct
  VARIANT 1: note = M or absent or a signal peptide linked via a peptide bond
XTALGRRKAEDRIKETLWADGVKIDEKDFEHIKSSHEDYFAVEYGKGSGYYDVNKKMDSEDTALCVGAVVTNMFHWWVDQNRENIEKFKKQDPENNGVMKFEGVKEATVDELNEFYRDNRDNYADQSRFFDLIKKHFPNKALNPEELFELYFNGFYYGSSHRYIEDNEPAQNNLFSKVLENNKLLNPERSYGIDGFSNNVINALKSHKVLGLVYTTPLRYRHIISMWGADIDQDGKVKAIYVTDSDDREITFNDNSKRRIGMIRYDVLVDDNGNIRFTGKGKTHKEEGAIYAGLYSLSLGDEVWEDYFKKYPEVQENL

SEQ ID NO: 492 - protein, 318 aa, synthetic construct
  VARIANT 1: note = M or absent or a signal peptide linked via a peptide bond
XTALGRRKAEDRIKETLWADGVKIDEKDFEHIKSSHEDYFAVEYGKGSGYYDVNKKMDSEDTALCVGAVVTNMFHWWVEQNRENIEKFKKQDPENNGVMKFEGVKEATVDELNEFYRDNRDNYADQSRFFDLIKKHFPNKALNPEELFELYFNGFYYGSSHRYIEDNEPAQNNLFSKVLDNNKLLNPERSYGIDGFSNNVINALKSHKVLGLVYTTPLRYRHIISMWGADIDQDGKVKAIYVTDSDDREITFNDNSKRRIGMIRYDVLVDDNGNIRFTGKGKTHKEEGAIYAGLYSLSLGDEVWEDYFKKYPEVQENL

SEQ ID NO: 493 - protein, 318 aa, synthetic construct
  VARIANT 1: note = M or absent or a signal peptide linked via a peptide bond
XTALGRRKAEDRIKETLWADGVKIDEKDFEHIDSSHEDYFAVEYGKGSGYYDVNKKMDSEDTALCVGAVVTNMFHWWVEQNRENIEKFKEQDPENNGVMKFEGVKEATVDELNEFYRDNRDNYADQSRFFDLIKKHFPNKALNPEELFELYFNGFYYGSSHRYIEDNEPAQNNLFSKVLDNNKLLNPERSYGIDGFSNNVINALKSHKVLGLVYTTPLRYRHIISMWGADIDQDGKVKAIYVTDSDDREITFNDNSKRRIGMIRYDVLVDDNGNIRFTGKGATHKEEGAIYAGLYSLSRGDEVWEDYFKKYPEVQENL

SEQ ID NO: 494 - protein, 318 aa, synthetic construct
  VARIANT 1: note = M or absent or a signal peptide linked via a peptide bond
XTALGRRKAEDRIKETLWADGVKIDEKDFEHIDSSHEDYFAVEYGKGSGYYDVNKKMDSEDTALCVGAVVTNMFHWWVDQNRENIEKFKEQDPENNGVMKFEGVKEATVDELNEFYRDNRDNYADQSRFFDLIKKHFPNKALNPEELFELYFNGFYYGSSHRYIEDNEPAQNNLFSKVLENNKLLNPERSYGIDGFSNNVINALKSHKVLGLVYTTPLRYRHIISMWGADIDQDGKVKAIYVTDSDDREITFNDNSKRRIGMIRYDVLVDDNGNIRFTGKGKTHKEEGAIYAGLYSLSLGDEVWEDYFKKYPEVQENL

SEQ ID NO: 495 - protein, 318 aa, synthetic construct
  VARIANT 1: note = M or absent or a signal peptide linked via a peptide bond
XTALGRRKAEDRIKETLWADGVKIDEKDFEHIKSSHEDYFAVEYGKGSGYYDVNKKMDSEDTALCVGAVVTNMFHWWVEQNRENIEKFKKQDPENNGVMKFEGVKEATVDELNHFYRDNRDNYADQSRFFDLIKKHFGNKALNPEELFELYFNGFYYGSSHRYIEDNEPAQNNLFSKVLENNKLLNPERSYGIDGFSNNVINALKSHKVLGLVYTTPLRYRHIISMWGADIDQDGKVKAIYVTDSDDREITFNDNSKRRIGMIRYDVLVDDNGNIRFTGKGATHKEEGAIYAGLYSLSRGDEVWEDYFKKYPEVQENL

SEQ ID NO: 496 - protein, 318 aa, synthetic construct
  VARIANT 1: note = M or absent or a signal peptide linked via a peptide bond
XTALGRRKAEDRIKETLWADGVKIDEKDFEHIKSSHEDYFAVEYGKGSGYYDVNKKMDSEDTALCVGAVVTNMFHWWVDQNRENIEKFKKQDPENNGVMKFEGVKEATVDELNHFYRDNRDNYADQSRFFDLIKKHFGNKALNPEELFELYFNGFYYGSSHRYIEDNEPAQNNLFSKVLDNNKLLNPERSYGIDGFSNNVINALKSHKVLGLVYTTPLRYRHIISMWGADIDQDGKVKAIYVTDSDDREITFNDNSKRRIGMIRYDVLVDDNGNIRFTGKGATHKEEGAIYAGLYSLSRGDEVWEDYFKKYPEVQENL

SEQ ID NO: 497 - protein, 318 aa, synthetic construct
  VARIANT 1: note = M or absent or a signal peptide linked via a peptide bond
XTALGRRKAEDRIKETLWADGVKIDEKDFEHIKSSHEDYFAVEYGKGSGYYDVNKKMDSEDTALCVGAVVTNMFHWWVDQNRENIEKFKKQDPENNGVMKFEGVKEATVDELNHFYRDNRDNYADQSRFFDLIKKHFGNKALNPEELFELYFNGFYYGSSHRYIEDNEPAQNNLFSKVLENNKLLNPERSYGIDGFSNNVINALKSHKVLGLVYTTPLRYRHIISMWGADIDQDGKVKAIYVTDSDDREITFNDNSKRRIGMIRYDVLVDDNGNIRFTGKGKTHKEEGAIYAGLYSLSRGDEVWEDYFKKYPEVQENL

SEQ ID NO: 498 - protein, 318 aa, synthetic construct
  VARIANT 1: note = M or absent or a signal peptide linked via a peptide bond
XTALGRRKAEDRIKETLWADGVKIDEKDFEHIKSSHEDYFAVEYGKGSGYYDVNKKMDSEDTALCVGAVVTNMFHWWVDQNRENIEKFKKQDPENNGVMKFEGVKEATVDELNHFYRDNRDNYADQSRFFDLIKKHFGNKALNPEELFELYFNGFYYGSSHRYIEDNEPAQNNLFSKVLENNKLLNPERSYGIDGFSNNVINALKSHKVLGLVYTTPLRYRHIISMWGADIDQDGKVKAIYVTDSDDREITFNDNSKRRIGMIRYDVLVDDEGNIRFTGKGATHKEEGAIYAGLYSLSRGDEVWEDYFKKYPEVQENL

SEQ ID NO: 499 - protein, 318 aa, synthetic construct
  VARIANT 1: note = M or absent or a signal peptide linked via a peptide bond
XTALGRRKAEDRIKETLWADGVKIDEKDFEHIKSSHEDYFAVEYGKGSGYYDVNKKMDSEDTALCVGAVVTNMFHWWVDQNRENIEKFKKQDPENNGVMKFEGVKEATVDELNHFYRDNRDNYADQSRFFDLIKKHFGNKALNPEELFELYFNGFYYGSSHRYIEDNEPAQNNLFSKVLENNKLLNPERSYGIDGFSNNVINALKSHKVLGLVYTTPLRYGHIISMWGADIDQDGKVKAIYVTDSDDREITFNDNSKRRIGMIRYDVLVDDNGNIRFTGKGATHKEEGAIYAGLYSLSRGDEVWEDYFKKYPEVQENL

SEQ ID NO: 500 - protein, 318 aa, synthetic construct
  VARIANT 1: note = M or absent or a signal peptide linked via a peptide bond
XTALGRRKAEDRIKETLWADGVKIDEKDFEHIKSSHEDYFAVEYGKGSGYYDVNKKMDSEDTALCVGAVVTNMFHWWVDQNRENIEKFKKQDPENNGVMKFEGVKEATVDELNHFYRDNRDNYADQSRFFDLIKKDFGNKALNPEELFELYFNGFYYGSSHRYIEDNEPAQNNLFSKVLENNKLLNPERSYGIDGFSNNVINALKSHKVLGLVYTTPLRYRHIISMWGADIDQDGKVKAIYVTDSDDREITFNDNSKRRIGMIRYDVLVDDNGNIRFTGKGATHKEEGAIYAGLYSLSRGDEVWEDYFKKYPEVQENL

SEQ ID NO: 501 - protein, 318 aa, synthetic construct
  VARIANT 1: note = M or absent or a signal peptide linked via a peptide bond
XTALGRRKAEDRIKETLWADGVKIDEKDFEHIKSSHEDYFAVEYGKGSGYYDVNKKMDSEDTALCVGAVVTNMFHWWVDQNRENIEKFKKQDPENNGVMKFEGVKEATVDELNHFYRDNRDNYADQSRFFDLIKKHFGNKALNPEELFELYFNGFYYGSSHRYIEDNEPAQNNLFSKVLENNKLLNPERSYGIDGFSNNVINALKSHKVLGLVYTTPLRYRHIISMWGADIDQDGKVKAIYVTDSDDREITFNDNSKRRIGMIRYDVLVDDNGNIRFTGKGATHKEEGAIYAGLYSLSLGDEVWEDYFKKYPEVQENL

SEQ ID NO: 502 - protein, 318 aa, synthetic construct
  VARIANT 1: note = M or absent or a signal peptide linked via a peptide bond
XTALGRRKAEDRIKETLWADGVKIDEKDFEHIKSSHEDYFAVEYGKGSGYYDVNKKMDSEDTALCVGAVVTNMFHWWVDQNRENIEKFKKQDPENNGVMKFEGVKEATVDELNHFYRDNRDNYADQSRFFDLIKKHFGNKALNPEELFELYFNGFYYGSSHRYIEDNEPAQNNLFSKVLENNKLLNPERSYGIDGFSNNVKNALKSHKVLGLVYTTPLRYRHIISMWGADIDQDGKVKAIYVTDSDDREITFNDNSKRRIGMIRYDVLVDDNGNIRFTGKGATHKEEGAIYAGLYSLSRGDEVWEDYFKKYPEVQENL

SEQ ID NO: 503 - protein, 318 aa, synthetic construct
  VARIANT 1: note = M or absent or a signal peptide linked via a peptide bond
XTALGRRKAEDRIKETLWADGVKIDEKDFEHIKSSHEDYFAVEYGKGSGYYDVNKKMDSEDTALCVGAVVTNMFHWWVDQNRENIEKFKKQDPENNGVMKFEGVKEATVDELNHFYRDNRDNYADQSRFFDLIKKHFPNKALNPEELFELYFNGFYYGSSHRYIEDNEPAQNNLFSKVLENNKLLNPERSYGIDGFSNNVINALKSHKVLGLVYTTPLRYRHIISMWGADIDQDGKVKAIYVTDSDDREITFNDNSKRRIGMIRYDVLVDDNGNIRFTGKGATHKEEGAIYAGLYSLSRGDEVWEDYFKKYPEVQENL

SEQ ID NO: 504 - protein, 318 aa, synthetic construct
  VARIANT 1: note = M or absent or a signal peptide linked via a peptide bond
XTALGRRKAEDRIKETLWADGVKIDEKDFEHIKSSHEDYFAVEYGKGSGYYDVNKKMDSEDTALCVGAVVTNMFHWWVDQNRENIEKFKKQDPENNGVMKFEGVKEATVDELNHFYRDNRDNYADQSRFFDLIKKHFGNKALNPEELFELYFNGFYYGSSHRYIEDNEPAQNNLFSKVLENNKLLNPERSYGIDGFSNNVINALKSHKVLGLVYTTPLRSRHIISMWGADIDQDGKVKAIYVTDSDDREITFNDNSKRRIGMIRYDVLVDDNGNIRFTGKGATHKEEGAIYAGLYSLSRGDEVWEDYFKKYPEVQENL

SEQ ID NO: 505 - protein, 318 aa, synthetic construct
  VARIANT 1: note = M or absent or a signal peptide linked via a peptide bond
XTALGRRKAEDRIKETLWADGVKIDEKDFEHIDSSHEDYFAVEYGKGSGYYDVNKKMDSEDTALCVGAVVTNMFHWWVDQNRENIEKFKKQDPENNGVMKFEGVKEATVDELNHFYRDNRDNYADQSRFFDLIKKHFGNKALNPEELFELYFNGFYYGSSHRYIEDNEPAQNNLFSKVLENNKLLNPERSYGIDGFSNNVINALKSHKVLGLVYTTPLRYRHIISMWGADIDQDGKVKAIYVTDSDDREITFNDNSKRRIGMIRYDVLVDDNGNIRFTGKGATHKEEGAIYAGLYSLSRGDEVWEDYFKKYPEVQENL

SEQ ID NO: 506 - protein, 318 aa, synthetic construct
  VARIANT 1: note = M or absent or a signal peptide linked via a peptide bond
XTALGRRKAEDRIKETLWADGVKIDEKDFEHIKSSHEDYFAVEYGKGSGYYDVNKKMDSEDTALCVGAVVTNMFHWWVDQNRENIEKFKKQDPENNGVMKFEGVKEATVDELNHFYRDNRDNYADQSRFFDLIKKHFGNKALNPEELFELYFNGFYYGSSHRYIEDNEPAQNNLFSKVLENNKLLNPERSYGIDGFSNNVINALKSHKVLGLVYTTPLRYRHIISMWGADIDQDGKVKAIYVTDPDDREITFNDNSKRRIGMIRYDVLVDDNGNIRFTGKGATHKEEGAIYAGLYSLSRGDEVWEDYFKKYPEVQENL

SEQ ID NO: 507 - protein, 318 aa, synthetic construct
  VARIANT 1: note = M or absent or a signal peptide linked via a peptide bond
XTALGRRKAEDRIKETLWADGVKIDEKDFEHIKSSHEDYFAVEYGKGSGYYDVNKKMDSEDTALCVGAVVTNMFHWWVDQNRENIEKFKEQDPENNGVMKFEGVKEATVDELNHFYRDNRDNYADQSRFFDLIKKHFGNKALNPEELFELYFNGFYYGSSHRYIEDNEPAQNNLFSKVLENNKLLNPERSYGIDGFSNNVINALKSHKVLGLVYTTPLRYRHIISMWGADIDQDGKVKAIYVTDSDDREITFNDNSKRRIGMIRYDVLVDDNGNIRFTGKGATHKEEGAIYAGLYSLSRGDEVWEDYFKKYPEVQENL

SEQ ID NO: 508 - protein, 318 aa, synthetic construct
  VARIANT 1: note = M or absent or a signal peptide linked via a peptide bond
XTALGRRKAEDRIKETLWADGVKIDEKDFEHIKSSHEDYFAVEYGKGSGYYDVNKKMDSEDTALCVGAVVTNMFHWWVDQNRENIEKFKKQDPENNGVMKFEGVKEATVDELNEFYRDNRDNYADQSRFFDLIKSHFGNKALNPEELFELYFNGFYYGSSHRYIEDNEPAQNNLFSKVLENNKLLNPERSYGIDGFSNNVINALKSHKVLGLVYTTPLRYRHIISMWGADIDQDGKVKAIYVTDSDDREITFNDNSARRIGMIRYDVLVDDNGNIRFTGKGATHKEEGAIYAGLYSLSRGDEVWEDYFKKYPEVQENL

SEQ ID NO: 509 - protein, 318 aa, synthetic construct
  VARIANT 1: note = M or absent or a signal peptide linked via a peptide bond
XTALGRRKAEDRIKETLWADGVKIDEKDFEHIKSSHEDYFAVEYGKGSGYYDVNKKMDSEDTALCVGAVVTNMFHWWVDQNRENIEKFKKQDPENNGVMKFEGVKEATVDELNEFYRDNRDNYADQSRFFDLIKKHFGNKALNPEELFELYFNGFYYGSSQRYIEDNEPAQNNLFSKVLENNKLLNPERSYGIDGFSNNVINALKSHKVLGLVYTTPLEYRHIISMWGADIDQDGKVKAIYVTDSDDREITFNDNSKRRIGMIRYDVLVDDNGNIRFTGKGATHKEEGAIYAGLYSLSRGDEVWEDYFKKYPEVQENL

SEQ ID NO: 510 - protein, 318 aa, synthetic construct
  VARIANT 1: note = M or absent or a signal peptide linked via a peptide bond
XTALGRRKAEDRIKETLWADGVKIDEKDFEHIKSSHEDYFAVEYGKGSGYYDVNKKMDSEDTALCVGAVVTNMFHWWVDQNRENIEKFKKQDPENNGVMKFEGVKEATVDELNEFYRDNRDNYADQSRFFDLIKSHFGNKALNPEELFELYFNGFYYGSSQRYIEDNEPAQNNLFSKVLENNKLLNPERSYGIDGFSNNVINALKSHKVLGLVYTTPLEYRHIISMWGADIDQDGKVKAIYVTDSDDREITFNDNSARRIGMIRYDVLVDDNGNIRFTGKGATHKEEGAIYAGLYSLSRGDEVWEDYFKKYPEVQENL

SEQ ID NO: 511 - protein, 318 aa, synthetic construct
  VARIANT 1: note = M or absent or a signal peptide linked via a peptide bond
XTALGRRKAEDRIKETLWADGVKIDEKDFEHIKSSHEDYFAVEYGKGSGYYDVNKKMDSEDTALCVGAVVTNMFHWWVDQNRENIEKFKKQDPENNGVMKFEGVKEATVDELNEFYRDNRDNYADQSRFFDLIKKHFGNKALNPEELFELYFNGFYYGSSHRYIEDNEPAQNNLFSKVLENNKLLNPERSYGIDGFSNNVINALKSHKVLGLVYTTPLRYRHIISMWGADIDQDGKVKAIYVTDSDDREITFNDNSKRRIGMIRYDVLVDKNGNIRFTGKGATHKEEGAIYAGLYSLSRGDEVWEDYFKKYPEVQENL

SEQ ID NO: 512 - protein, 318 aa, synthetic construct
  VARIANT 1: note = M or absent or a signal peptide linked via a peptide bond
XTALGRRKAEDRIKETLWADGVKIDEKDFEHIKSSHEDYFAVEYGKGSGYYDVNKKMDSEDTALCVGAVVTNMFHWWVDQNRENIEKFKKQDPENNGVMKFEGVKEATVDELNEFYRDNRDNYADQSRFFDLIKKHFGNKALNPEELFELYFNGFYYGSSHRYIEDNEPAQGNLFSKVLENNKLLNPERSYGIDGFSNNVINALKSHKVLGLVYTTPLRYRHIISMWGADIDQDGKVKAIYVTDSDDREITFNDNSKRRIGMIRYDVLVDDNGNIRFTGKGATHKEEGAIYAGLYSLSRGDEVWEDYFKKYPEVQENL

SEQ ID NO: 513 - protein, 318 aa, synthetic construct
  VARIANT 1: note = M or absent or a signal peptide linked via a peptide bond
XTALGRRKAEDRIKETLWADGVKIDEKDFEHIKSSHEDYFAVEYGKGSGYYDVNKKMDSEDTALCVGAVVTNMFHWWVDQNRENIEKFKKQDPENNGVMKFEGVKEATVDELNEFYRDNRDNYADQSRFFDLIKKHFGNKALNPEELFELYFNGFYYGSSHRYIEDNEPAQNNLFSKVLENNKLLNPERSYGRDGFSNNVINALKSHKVLGLVYTTPLRYRHIISMWGADIDQDGKVKAIYVTDSDDREITFNDNSKRRIGMIRYDVLVDDNGNIRFTGKGATHKEEGAIYAGLYSLSRGDEVWEDYFKKYPEVQENL

SEQ ID NO: 514 - protein, 318 aa, synthetic construct
  VARIANT 1: note = M or absent or a signal peptide linked via a peptide bond
XTALGRRKAEDRIKETLWADGVKIDEKDFEHIKSSHEDYFAVEYGKGSGYYDVNKKMDSEDTALCVGAVVTNMFHWWVDQNRENIEKFKKQDPENNGVMKFEGVKEATVDELNEFYRDNRDNYADQSRFFDLIKKHFGNKALNPEELFELYFNGFYYGSSHRYIEDNEPAQNNLFSKVLENNKLLNPERSYGIDGFSNNVINALKSHKVLGLVYTTPLRYRHIISMWGADIDQDGKVKAIYVTDSDDREITFNDNSKRRIGMIRYDVLVDDNGNIRFTGKGATHKEEGAIYAGLYSLSRGDKVWEDYFKKYPEVQENL

SEQ ID NO: 515 - protein, 318 aa, synthetic construct
  VARIANT 1: note = M or absent or a signal peptide linked via a peptide bond
XTALGRRKAEDRIKETLWADGVKIDEKDFEHIKSSHEDYFAVEYGKGSGYYDVNKKMDSEDTALCVGAVVTNMFHWWVDQNRENIEKFKKQDPENNGVMKFEGVKEATVDELNEFYRDNRDNYADQSRFFDLIKKHFGNKALNPEELFELYFNGFYYGSSHRYIEDNEPAQNNLFSKVLENNKLLNPERSYGIDGFSNNVINALKSHKVLGLVYTTPLRYRHIISMWGADIDQDGKVKAIYVTDSDDREITFNDNSKRRIGMIRYDVLVDDNGNIRFTGKGATHKEEGAIYAGLYSLSRGDEVWKDYFKKYPEVQENL

SEQ ID NO: 516 - protein, 318 aa, synthetic construct
  VARIANT 1: note = M or absent or a signal peptide linked via a peptide bond
XTALGRRKAEDRIKETLWADGVKIDEKDFEHIKSSHEDYFAVEYGKGSGYYDVNKKMDSEDTALCVGAVVTNMFHWWVDQNRENIEKFKKQDPENNGVMKFEGVKEATVDELNEFYRDNRDNYADQSRFFDLIKKHFGNKALNPEELFELYFNGFYYGSSHRYIEDNEPAQNNLFSKVLENNKLLNPERSYGIDGFSNNVINALKSHKVLGLVYTTPLRYRHIISMWGADIDQDGKVKAIYVTDSDDREITFNDNSKRRIGMIRYDVLVDDNGNIRFTGKGATHKNEGAIYAGLYSLSRGDEVWEDYFKKYPEVQENL

SEQ ID NO: 517 - protein, 318 aa, synthetic construct
  VARIANT 1: note = M or absent or a signal peptide linked via a peptide bond
XTALGRRKAEDRIKETLWADGVKIDEKDFEHIKSSHEDYFAVEYGKGSGYYDVNKKMDSEDSALCVGAVVTNMFHWWVDQNRENIEKFKKQDPENNGVMKFEGVKEATVDELNEFYRDNRDNYADQSRFFDLIKSHFGNKALNPEELFELYFNGFYYGSSHRYIEDNEPAQNNLFSKVLENNKLLNPERSYGIDGFSNNVINALKSHKVLGLVYTTPLRYRHIISMWGADIDQDGKVKAIYVTDSDDREITFNDNSARRIGMIRYDVLVDDNGNIRFTGKGATHKEEGAIYAGLYSLSRGDEVWEDYFKKYPEVQENL

SEQ ID NO: 518 - protein, 318 aa, synthetic construct
  VARIANT 1: note = M or absent or a signal peptide linked via a peptide bond
XTALGRRKAEDRIKETLWADGVKIDEKDFEHIKSSHEDYFAVEYGKGSGYYDVNKKMDSEDSALCVGAVVTNMFHWWVDQNRENIEKFKKQDPENNGVMKFEGVKEATVDELNEFYRDNRDNYADQSRFFDLIKKHFGNKALNPEELFELYFNGFYYGSSQRYIEDNEPAQNNLFSKVLENNKLLNPERSYGIDGFSNNVINALKSHKVLGLVYTTPLEYRHIISMWGADIDQDGKVKAIYVTDSDDREITFNDNSKRRIGMIRYDVLVDDNGNIRFTGKGATHKEEGAIYAGLYSLSRGDEVWEDYFKKYPEVQENL

SEQ ID NO: 519 - protein, 318 aa, synthetic construct
  VARIANT 1: note = M or absent or a signal peptide linked via a peptide bond
XTALGRRKAEDRIKETLWADGVKIDEKDFEHIKSSHEDYFAVEYGKGSGYYDVNKKMDSEDSALCVGAVVTNMFHWWVDQNRENIEKFKKQDPENNGVMKFEGVKEATVDELNEFYRDNRDNYADQSRFFDLIKSHFGNKALNPEELFELYFNGFYYGSSQRYIEDNEPAQNNLFSKVLENNKLLNPERSYGIDGFSNNVINALKSHKVLGLVYTTPLEYRHIISMWGADIDQDGKVKAIYVTDSDDREITFNDNSARRIGMIRYDVLVDDNGNIRFTGKGATHKEEGAIYAGLYSLSRGDEVWEDYFKKYPEVQENL

SEQ ID NO: 520 - protein, 318 aa, synthetic construct
  VARIANT 1: note = M or absent or a signal peptide linked via a peptide bond
XTALGRRKAEDRIKETLWADGVKIDEKDFEHIKSSHEDYFAVEYGKGSGYYDVNKKMDSEDTALCVGAVVTNMFHWWVDQNRENIEKFKKQDPENNGVMKFEGVKEATVDELNEFYRDNRDNYADQSRFFDLIKKHFGNKALNPEELFELYFNGFYYGSSHRYIEDNEPAQNNLFSKVLENNKLLNPERSYGIDGFSNNVINALKSHKVLGLVYTTPLRYRHIISMWGADIDQDGKVKAIYVTDSDDREITFNDNSKRRIGMIRYDVLVDDNGNIRFTGKGATHKEEGAIYAGLYSLSRGDKVWKDYFKKYPEVQENL

SEQ ID NO: 521 - protein, 318 aa, synthetic construct
  VARIANT 1: note = M or absent or a signal peptide linked via a peptide bond
XTALGRRKAEDRIKETLWADGVKIDEKDFEHIKSSHEDYFAVEYGKGSGYYDVNKKMDSEDTALCVGAVVTNMFHWWVDQNRENIEKFKKQDPENNGVMKFEGVKEATVDELNEFYRDNRDNYADQSRFFDLIKKHFGNKALNPEELFELYFNGFYYGSSHRYIEDNEPAQNNLFSKVLENNKLLNPERSYGIDGFSNNVINALKSHKVLGLVYTTPLRYRHIISMWGADIDQDGKVKAIYVTDSDDREITFNDNSKRRIGMIRYDVLVDKNGNIRFTGKGATHKNEGAIYAGLYSLSRGDEVWEDYFKKYPEVQENL

SEQ ID NO: 522 - protein, 318 aa, synthetic construct
  VARIANT 1: note = M or absent or a signal peptide linked via a peptide bond
XTALGRRKAEDRIKETLWADGVKIDEKDFEHIKSSHEDYFAVEYGKGSGYYDVNKKMDSEDTALCVGAVVTNMFHWWVDQNRENIEKFKKQDPENNGVMKFEGVKEATVDELNEFYRDNRDNYADQSRFFDLIKKHFGNKALNPEELFELYFNGFYYGSSHRYIEDNEPAQNNLFSKVLENNKLLNPERSYGRDGFSNNVINALKSHKVLGLVYTTPLRYRHIISMWGADIDQDGKVKAIYVTDSDDREITFNDNSKRRIGMIRYDVLVDKNGNIRFTGKGATHKNEGAIYAGLYSLSRGDKVWKDYFKKYPEVQENL

SEQ ID NO: 523 - protein, 318 aa, synthetic construct
  VARIANT 1: note = M or absent or a signal peptide linked via a peptide bond
XTALGRRKAEDRIKETLWADGVKIDEKDFEHIKSSHEDYFAVEYGKGSGYYDVNKKMDSEDTALSVGAVVTNMFHWWVDQNRENIEKFKKQDPENNGVMKFEGVKEATVDELNEFYRDNRDNYADQSRFFDLIKKHFGNKALNPEELFELYFNGFYYGSSHRYIEDNEPAQNNLFSKVLENNKLLNPERSYGIDGFSNNVINALKSHKVLGLVYTTPLRYRHIISMWGADIDQDGKVKAIYVTDSDDREITFNDNSKRRIGMIRYDVLVDDNGNIRFTGKGATHKEEGAIYAGLYSLSRGDEVWEDYFKKYPEVQENL

SEQ ID NO: 524 - protein, 318 aa, synthetic construct
  VARIANT 1: note = M or absent or a signal peptide linked via a peptide bond
XTALGRRKAEDRIKETLWADGVKIDEKDFEHIKSSHEDYFAVEYGKGSGYYDVNKKMDSEDTALCVGAVVTNMFHWWVDQNRENIEKFKKQNPENNGVMKFEGVKEATVDELNEFYRDNRDNYADQSRFFDLIKKHFGNKALNPEELFELYFNGFYYGSSHRYIEDNEPAQNNLFSKVLENNKLLNPERSYGIDGFSNNVINALKSHKVLGLVYTTPLRYRHIISMWGADIDQDGKVKAIYVTDSDDREITFNDNSKRRIGMIRYDVLVDDNGNIRFTGKGATHKEEGAIYAGLYSLSRGDEVWEDYFKKYPEVQENL

SEQ ID NO: 525 - protein, 318 aa, synthetic construct
  VARIANT 1: note = M or absent or a signal peptide linked via a peptide bond
XTALGRRKAEDRIKETLWADGVKIDEKDFEHIKSSHEDYFAVEYGKGSGYYDVNKKMDSEDTALCVGAVVTNMFHWWVDQNRENIEKFKKQDPENNGVMKFEGVKEATVDELNEFYRDNRDNYADQSRFFDLIKKHFGNKALNPEELFELYFNGFYYGSSHRYIEDNEPAQNNLFSKVLENNKLLNPERSYGIDGFSNNVINALKSHKVLGLVYTTPLRYRHIISMWGADIDQDGKVKAIYVTDSDDREITFNDNSKRRIGMIRYDVLVDDEGNIRFTGKGATHKEEGAIYAGLYSLSRGDEVWEDYFKKYPEVQENL

SEQ ID NO: 526 - protein, 318 aa, synthetic construct
  VARIANT 1: note = M or absent or a signal peptide linked via a peptide bond
XTALGRRKAEDRIKETLWADGVKIDEKDFEHIKSSHEDYFAVEYGKGSGYYDVNKKMDSEDTALCVGAVVTNMFHWWVDQNRENIEKFKKQDPENNGVMKFEGVKEATVDELNEFYRDNRDNYADQSRFFDLIKKDFGNKALNPEELFELYFNGFYYGSSHRYIEDNEPAQNNLFSKVLENNKLLNPERSYGIDGFSNNVINALKSHKVLGLVYTTPLRYRHIISMWGADIDQDGKVKAIYVTDSDDREITFNDNSKRRIGMIRYDVLVDDNGNIRFTGKGATHKEEGAIYAGLYSLSRGDEVWEDYFKKYPEVQENL

SEQ ID NO: 527 - protein, 318 aa, synthetic construct
  VARIANT 1: note = M or absent or a signal peptide linked via a peptide bond
XTALGRRKAEDRIKETLWADGVKIDEKDFEHIKSSHEDYFAVEYGKGSGYYDVNKKMDSEDTALCVGAVVTNMFHWWVDQNRENIEKFKKQDPENNGVMKFEGVKEATVDELNEFYRDNRDNYADQSRFFDLIKKHFGNKALNPEELFELYFNGFYYGSSHRYIEDNEPAQGNLFSKVLENNKLLNPERSYGIDGFSNNVINALKSHKVLGLVYTTPLRYRHIISMWGADIDQDGKVKAIYVTDSDDREITFNDNSKRRIGMIRYDVLVDKNGNIRFTGKGATHKEEGAIYAGLYSLSRGDEVWEDYFKKYPEVQENL

SEQ ID NO: 528 - protein, 319 aa, synthetic construct
  VARIANT 1: note = M or absent or a signal peptide linked via a peptide bond
XTALGRRKAEDRIKETLWADGVKIDEKDFEHIKSSHEDYFAVEYGKGSGYYDVNKKMDSEDTALCVGAVVTNMFHWWVDQNRENIEKFKKQDPENNGVMKFEGVKEATVDELNHFYKEYQSNKYADQSRFFDLIKKHFGNKALNPEELFELYFNGFYYQSSHRYIEDNEPAQNNLFSKVLENNKLLNPERSYGIDGFSNNVINALKSHKVLGLVHTTPLTYRHIISMWGADIDQDGKVKAIYVTDSDDREITFNDNSKRRIGMIRYDVLVDDNGNIRFTGKGATHKEEGAIYAGLYSLSRGDEVWEDYFKKYPEVQENL

SEQ ID NO: 529 - protein, 559 aa, synthetic construct
TALGRRKAEDRIKETLWADGVKIDEKDFEHIKSSHEDYFAVEYGKGSGYYDVNKKMDSEDSALCVGSVVTNMFHWWVDQNRENIEKFKKQDLENNGVMKFNGVKEATVDELNHFYKEYQSNKYADQSRFFDLIKKHFGNKALNPEELFELYFNGFYYNSSHRYIEDNKPAQNNLFSKVLENNKLLNPERSYGIDGFSNNVINALKSHKVLGLVHTTPLRYRHIISMWGADIDQDGKVKAIYVTDSDDREITFNDNSKRRIGMKRYDVLVDDFGNIRFTGKGATHKEEGAIYAGLYSLSRGDEVWEDYFKKYPEVQENLGGGSEGGGSEGGGSEDKTHTCPPCPAPEAAGAPSVFLFPPKPKDTLMISRTPEVTCVVVDVSHEDPEVKFNWYVDGVEVHNAKTKPREEQQNSTYRVVSVLTVLHQDWLNGKEYKCKVSNKALKAPIEKTISKAKGQPREPQVYTLPPSRDELTKNQVSLTCLVKGFYPSDIAVEWESNGQPENNYKTTPPVLDSDGSFFLYSKLTVDKSRWQQGNVFSCSVMHEALHNHYTQKSLSLSPG

SEQ ID NO: 530 - protein, 558 aa, synthetic construct
DKTHTCPPCPAPEAAGAPSVFLFPPKPKDTLMISRTPEVTCVVVDVSHEDPEVKFNWYVDGVEVHNAKTKPREEQQNSTYRVVSVLTVLHQDWLNGKEYKCKVSNKALKAPIEKTISKAKGQPREPQVYTLPPSRDELTKNQVSLTCLVKGFYPSDIAVEWESNGQPENNYKTTPPVLDSDGSFFLYSKLTVDKSRWQQGNVFSCSVMHEALHNHYTQKSLSLSPGGGGSGGGGSGGGGSTALGRRKAEDRIKETLWADGVKIDEKDFEHIKSSHEDYFAVEYGKGSGYYDVNKKMDSEDTALCVGAVVTNMFHWWVDQNRENIEKFKKQDPENNGVMKFNGVKEATVDELNHFYKEYQSNKYADQSRFFDLIKKHFGNKALNPEELFELYFNGFYYNSSHRYIEDNKPAQNNLFSKVLENNKLLNPERSYGIDGFSNNVINALKSHKVLGLVHTTPLRYRHIISMWGADIDQDGKVKAIYVTDSDDREITFNDNSKRRIGMIRYDVLVDDNGNIRFTGKGATHKEEGAIYAGLYSLSRGDEVWEDYFKKYPEVQENL

SEQ ID NO: 531 - protein, 558 aa, synthetic construct
DKTHTCPPCPAPEAAGAPSVFLFPPKPKDTLMISRTPEVTCVVVDVSHEDPEVKFNWYVDGVEVHNAKTKPREEQQNSTYRVVSVLTVLHQDWLNGKEYKCKVSNKALKAPIEKTISKAKGQPREPQVYTLPPSRDELTKNQVSLTCLVKGFYPSDIAVEWESNGQPENNYKTTPPVLDSDGSFFLYSKLTVDKSRWQQGNVFSCSVMHEALHNHYTQKSLSLSPGGGGSGGGGSGGGGSTALGRRKAEDRIKETLWADGVKIDEKDFEHIKSSHEDYFAVEYGKGSGYYDVNKKMDSEDTALCVGAVVTNMFHWWVDQNRENIEKFKKQDPENNGVMKFNGVKEATVDELNHFYKEYQSNKYADQSRFFDLIKKHFGNKALNPEELFELYFNGFYYQSSHRYIEDNKPAQNNLFSKVLENNKLLNPERSYGIDGFSNNVINALKSHKVLGLVHTTPLRYRHIISMWGADIDQDGKVKAIYVTDSDDREITFNDNSKRRIGMIRYDVLVDDNGNIRFTGKGATHKEEGAIYAGLYSLSRGDEVWEDYFKKYPEVQENL

SEQ ID NO: 532 - protein, 558 aa, synthetic construct
DKTHTCPPCPAPEAAGAPSVFLFPPKPKDTLMISRTPEVTCVVVDVSHEDPEVKFNWYVDGVEVHNAKTKPREEQQNSTYRVVSVLTVLHQDWLNGKEYKCKVSNKALKAPIEKTISKAKGQPREPQVYTLPPSRDELTKNQVSLTCLVKGFYPSDIAVEWESNGQPENNYKTTPPVLDSDGSFFLYSKLTVDKSRWQQGNVFSCSVMHEALHNHYTQKSLSLSPGGGGSGGGGSGGGGSTALGRRKAEDRIKETLWADGVKIDEKDFEHIKSSHEDYFAVEYGKGSGYYDVNKKMDSEDTALCVGAVVTNMFHWWVDQNRENIEKFKKQDPENNGVMKFEGVKEATVDELNHFYKEYQSNKYADQSRFFDLIKKHFGNKALNPEELFELYFNGFYYNSSHRYIEDNEPAQNNLFSKVLENNKLLNPERSYGIDGFSNNVINALKSHKVLGLVHTTPLTYRHIISMWGADIDQDGKVKAIYVTDSDDREITFNDNSKRRIGMIRYDVLVDDNGNIRFTGKGATHKEEGAIYAGLYSLSRGDEVWEDYFKKYPEVQENL

SEQ ID NO: 533 - protein, 558 aa, synthetic construct
DKTHTCPPCPAPEAAGAPSVFLFPPKPKDTLMISRTPEVTCVVVDVSHEDPEVKFNWYVDGVEVHNAKTKPREEQQNSTYRVVSVLTVLHQDWLNGKEYKCKVSNKALKAPIEKTISKAKGQPREPQVYTLPPSRDELTKNQVSLTCLVKGFYPSDIAVEWESNGQPENNYKTTPPVLDSDGSFFLYSKLTVDKSRWQQGNVFSCSVMHEALHNHYTQKSLSLSPGGGGSGGGGSGGGGSTALGRRKAEDRIKETLWADGVKIDEKDFEHIKSSHEDYFAVEYGKGSGYYDVNKKMDSEDTALCVGAVVTNMFHWWVDQNRENIEKFKKQDPENNGVMKFEGVKEATVDELNHFYKEYQSNKYADQSRFFDLIKKHFGNKALNPEELFELYFNGFYYNSSHRYIEDNEPAQNNLFSKVLENNKLLNPERSYGIDGFSNNVINALKSHKVLGLVHTTPLRYRHIISMWGADIDQDGKVKAIYVTDSDDREITFNDNSKRRIGMIRYDVLVDDNGNIRFTGKGATHKEEGAIYAGLYSLSRGDEVWEDYFKKYPEVQENL

SEQ ID NO: 534 - protein, 558 aa, synthetic construct
DKTHTCPPCPAPEAAGAPSVFLFPPKPKDTLMISRTPEVTCVVVDVSHEDPEVKFNWYVDGVEVHNAKTKPREEQQNSTYRVVSVLTVLHQDWLNGKEYKCKVSNKALKAPIEKTISKAKGQPREPQVYTLPPSRDELTKNQVSLTCLVKGFYPSDIAVEWESNGQPENNYKTTPPVLDSDGSFFLYSKLTVDKSRWQQGNVFSCSVMHEALHNHYTQKSLSLSPGGGGSGGGGSGGGGSTALGRRKAEDRIKETLWADGVKIDEKDFEHIKSSHEDYFAVEYGKGSGYYDVNKKMDSEDTALCVGAVVTNMFHWWVDQNRENIEKFKKQDPENNGVMKFEGVKEATVDELNHFYKEYQSNKYADQSRFFDLIKKHFGNKALNPEELFELYFNGFYYQSSHRYIEDNEPAQNNLFSKVLENNKLLNPERSYGIDGFSNNVINALKSHKVLGLVHTTPLTYRHIISMWGADIDQDGKVKAIYVTDSDDREITFNDNSKRRIGMIRYDVLVDDNGNIRFTGKGATHKEEGAIYAGLYSLSRGDEVWEDYFKKYPEVQENL

SEQ ID NO: 535 - protein, 708 aa, synthetic construct
DKTHTCPPCPAPEAAGAPSVFLFPPKPKDTLMISRTPEVTCVVVDVSHEDPEVKFNWYVDGVEVHNAKTKPREEQQNSTYRVVSVLTVLHQDWLNGKEYKCKVSNKALKAPIEKTISKAKGQPREPQVYTLPPSRDELTKNQVSLTCLVKGFYPSDIAVEWESNGQPENNYKTTPPVLDSDGSFFLYSKLTVDKSRWQQGNVFSCSVMHEALHNHYTQKSLSLSPGGGGSGGGGSGGGGSTALGRRKAEDRIKETLWADGVKIDEKDFEHIKSSHEDYFAVEYGKGSGYYDVNKKMDSEDTALCVGAVVTNMFHWWVDQNRENIEKFKKQDPENNGVMKFNGVKEATVDELNHFYKEYQSNKYADQSRFFDLIKKHFGNKALNPEELFELYFNGFYYNSSHRYIEDNKPAQNNLFSKVLENNKLLNPERSYGIDGFSNNVINALKSHKVLGLVHTTPLRYRHIISMWGADIDQDGKVKAIYVTDSDDREITFNDNSKRRIGMIRYDVLVDDNGNIRFTGKGATHKEEGAIYAGLYSLSRGDEVWEDYFKKYPEVQENLENNVADSNKNSEDVEVSSVEFDFLNFKYPKNEDQVSTEDMRLTLKDTNVFNQPQVKISFEEQNGNDWKEKDSGTFEEGKKYRLKIDVNKLALKIYGHLSKNKLNVIVNGKAVNIQNVVKKDSIETSFTIYSDSIDLEKINYWTDSFNNWS

SEQ ID NO: 536 - protein, 558 aa, synthetic construct
DKTHTCPPCPAPEAAGAPSVFLFPPKPKDTLMISRTPEVTCVVVDVSHEDPEVKFNWYVDGVEVHNAKTKPREEQQNSTYRVVSVLTVLHQDWLNGKEYKCKVSNKALKAPIEKTISKAKGQPREPQVYTLPPSRDELTKNQVSLTCLVKGFYPSDIAVEWESNGQPENNYKTTPPVLDSDGSFFLYSKLTVDKSRWQQGNVFSCSVMHEALHNHYTQKSLSLSPGGGGSGGGGSGGGGSTALGRRKAEDRIKETLWADGVKIDEKDFEHIKSSHEDYFAVEYGKGSGYYDVNKKMDSEDTALCVGAVVTNMFHWWVDQNRENIEKFKKQDPENNGVMKFNGVKEATVDELNHFYKEYQSNKYADQSRFFDLIKKHFGNKALNPEELFELYFNGFYYNSSHRYIEDNKPAQNNLFSKVLENNKLLNPERSYGIDGFSNNVINALKSHKVLGLVHTTPLRYRHIISMWGADIDQDGKVKAIYVTDSDDREITFNDQSSRRIGMIRYDVLVDDNGNIRFTGKGATHKEEGAIYAGLYSLSRGDEVWEDYFKKYPEVQENL

SEQ ID NO: 537 - protein, 558 aa, synthetic construct
DKTHTCPPCPAPEAAGAPSVFLFPPKPKDTLMISRTPEVTCVVVDVSHEDPEVKFNWYVDGVEVHNAKTKPREEQQNSTYRVVSVLTVLHQDWLNGKEYKCKVSNKALKAPIEKTISKAKGQPREPQVYTLPPSRDELTKNQVSLTCLVKGFYPSDIAVEWESNGQPENNYKTTPPVLDSDGSFFLYSKLTVDKSRWQQGNVFSCSVMHEALHNHYTQKSLSLSPGGGGSGGGGSGGGGSTALGRRKAEDRIKETLWADGVKIDEKDFEHIKSSHEDYFAVEYGKGSGYYDVNKKMDSEDTALCVGAVVTNMFHWWVDQNRENIEKFKKQDPENNGVMKFNGVKEATVDELNHFYKEYQSNKYADQSRFFDLIKKHFGNKALNPEELFELYFNGFYYNSSHRYIEDNKPAQNNLFSKVLENNKLLNPERSYGIDGFSNNVINALKSHKVLGLVYTTPLRYRHIISMWGADIDQDGKVKAIYVTDSDDREITFNDNSKRRIGMIRYDVLVDDNGNIRFTGKGATHKEEGAIYAGLYSLSRGDEVWEDYFKKYPEVQENL

SEQ ID NO: 538 - protein, 558 aa, synthetic construct
DKTHTCPPCPAPEAAGAPSVFLFPPKPKDTLMISRTPEVTCVVVDVSHEDPEVKFNWYVDGVEVHNAKTKPREEQQNSTYRVVSVLTVLHQDWLNGKEYKCKVSNKALKAPIEKTISKAKGQPREPQVYTLPPSRDELTKNQVSLTCLVKGFYPSDIAVEWESNGQPENNYKTTPPVLDSDGSFFLYSKLTVDKSRWQQGNVFSCSVMHEALHNHYTQKSLSLSPGGGGSGGGGSGGGGSTALGRRKAEDRIKETLWADGVKIDEKDFEHIKSSHEDYFAVEYGKGSGYYDVNKKMDSEDTALSVGAVVTNMFHWWVDQNRENIEKFKKQDPENNGVMKFNGVKEATVDELNHFYKEYQSNKYADQSRFFDLIKKHFGNKALNPEELFELYFNGFYYNSSHRYIEDNKPAQNNLFSKVLENNKLLNPERSYGIDGFSNNVINALKSHKVLGLVHTTPLRYRHIISMWGADIDQDGKVKAIYVTDSDDREITFNDNSKRRIGMIRYDVLVDDNGNIRFTGKGATHKEEGAIYAGLYSLSRGDEVWEDYFKKYPEVQENL

SEQ ID NO: 539 - protein, 557 aa, synthetic construct
DKTHTCPPCPAPEAAGAPSVFLFPPKPKDTLMISRTPEVTCVVVDVSHEDPEVKFNWYVDGVEVHNAKTKPREEQQNSTYRVVSVLTVLHQDWLNGKEYKCKVSNKALKAPIEKTISKAKGQPREPQVYTLPPSRDELTKNQVSLTCLVKGFYPSDIAVEWESNGQPENNYKTTPPVLDSDGSFFLYSKLTVDKSRWQQGNVFSCSVMHEALHNHYTQKSLSLSPGGGGSGGGGSGGGGSTALGRRKAEDRIKETLWADGVKIDEKDFEHIKSSHEDYFAVEYGKGSGYYDVNKKMDSEDTALCVGAVVTNMFHWWVDQNRENIEKFKKQDPENNGVMKFEGVKEATVDELNHFYRDNRDNYADQSRFFDLIKKHFGNKALNPEELFELYFNGFYYGSSHRYIEDNEPAQNNLFSKVLENNKLLNPERSYGIDGFSNNVINALKSHKVLGLVHTTPLRYRHIISMWGADIDQDGKVKAIYVTDSDDREITFNDNSKRRIGMIRYDVLVDDNGNIRFTGKGATHKEEGAIYAGLYSLSRGDEVWEDYFKKYPEVQENL

SEQ ID NO: 540 - protein, 557 aa, synthetic construct
DKTHTCPPCPAPEAAGAPSVFLFPPKPKDTLMISRTPEVTCVVVDVSHEDPEVKFNWYVDGVEVHNAKTKPREEQQNSTYRVVSVLTVLHQDWLNGKEYKCKVSNKALKAPIEKTISKAKGQPREPQVYTLPPSRDELTKNQVSLTCLVKGFYPSDIAVEWESNGQPENNYKTTPPVLDSDGSFFLYSKLTVDKSRWQQGNVFSCSVMHEALHNHYTQKSLSLSPGGGGSGGGGSGGGGSTALGRRKAEDRIKETLWADGVKIDEKDFEHIKSSHEDYFAVEYGKGSGYYDVNKKMDSEDTALCVGAVVTNMFHWWVDQNRENIEKFKKQDPENNGVMKFEGVKEATVDELNHFYRDNRDNYADQSRFFDLIKKHFGNKALNPEELFELYFNGFYYGSSHRYIEDNEPAQNNLFSKVLENNKLLNPERSYGIDGFSNNVINALKSHKVLGLVYTTPLRYRHIISMWGADIDQDGKVKAIYVTDSDDREITFNDNSKRRIGMIRYDVLVDDNGNIRFTGKGATHKEEGAIYAGLYSLSRGDEVWEDYFKKYPEVQENL

SEQ ID NO: 541 - protein, 557 aa, synthetic construct
DKTHTCPPCPAPEAAGAPSVFLFPPKPKDTLMISRTPEVTCVVVDVSHEDPEVKFNWYVDGVEVHNAKTKPREEQQNSTYRVVSVLTVLHQDWLNGKEYKCKVSNKALKAPIEKTISKAKGQPREPQVYTLPPSRDELTKNQVSLTCLVKGFYPSDIAVEWESNGQPENNYKTTPPVLDSDGSFFLYSKLTVDKSRWQQGNVFSCSVMHEALHNHYTQKSLSLSPGGGGSGGGGSGGGGSTALGRRKAEDRIKETLWADGVKIDEKDFEHIKSSHEDYFAVEYGKGSGYYDVNKKMDSEDSALCVGAVVTNMFHWWVDQNRENIEKFKKQDPENNGVMKFEGVKEATVDELNHFYRDNRDNYADQSRFFDLIKKHFGNKALNPEELFELYFNGFYYGSSHRYIEDNEPAQNNLFSKVLENNKLLNPERSYGIDGFSNNVINALKSHKVLGLVHTTPLRYRHIISMWGADIDQDGKVKAIYVTDSDDREITFNDNSKRRIGMIRYDVLVDDNGNIRFTGKGATHKEEGAIYAGLYSLSRGDEVWEDYFKKYPEVQENL

SEQ ID NO: 542 - protein, 557 aa, synthetic construct
DKTHTCPPCPAPEAAGAPSVFLFPPKPKDTLMISRTPEVTCVVVDVSHEDPEVKFNWYVDGVEVHNAKTKPREEQQNSTYRVVSVLTVLHQDWLNGKEYKCKVSNKALKAPIEKTISKAKGQPREPQVYTLPPSRDELTKNQVSLTCLVKGFYPSDIAVEWESNGQPENNYKTTPPVLDSDGSFFLYSKLTVDKSRWQQGNVFSCSVMHEALHNHYTQKSLSLSPGGGGSGGGGSGGGGSTALGRRKAEDRIKETLWADGVKIDEKDFEHIKSSHEDYFAVEYGKGSGYYDVNKKMDSEDTALCVGAVVTNMFHWWVDQNRENIEKFKKQDPENNGVMKFEGVKEATVDELNHFYRDNRDNYADQSRFFDLIKKHFGNKALNPEELFELYFNGFYYGSSHRYIEDNEPAQNNLFSKVLENNKLLNPERSYGIDGFSNNVINALKSHKVLGLVYTTPLTYRHIISMWGADIDQDGKVKAIYVTDSDDREITFNDNSKRRIGMIRYDVLVDDNGNIRFTGKGATHKEEGAIYAGLYSLSRGDEVWEDYFKKYPEVQENL

SEQ ID NO: 543 - protein, 557 aa, synthetic construct
DKTHTCPPCPAPEAAGAPSVFLFPPKPKDTLMISRTPEVTCVVVDVSHEDPEVKFNWYVDGVEVHNAKTKPREEQQNSTYRVVSVLTVLHQDWLNGKEYKCKVSNKALKAPIEKTISKAKGQPREPQVYTLPPSRDELTKNQVSLTCLVKGFYPSDIAVEWESNGQPENNYKTTPPVLDSDGSFFLYSKLTVDKSRWQQGNVFSCSVMHEALHNHYTQKSLSLSPGGGGSGGGGSGGGGSTALGRRKAEDRIKETLWADGVKIDEKDFEHIKSSHEDYFAVEYGKGSGYYDVNKKMDSEDSALCVGAVVTNMFHWWVDQNRENIEKFKKQDPENNGVMKFEGVKEATVDELNHFYRDNRDNYADQSRFFDLIKKHFGNKALNPEELFELYFNGFYYGSSHRYIEDNEPAQNNLFSKVLENNKLLNPERSYGIDGFSNNVINALKSHKVLGLVHTTPLTYRHIISMWGADIDQDGKVKAIYVTDSDDREITFNDNSKRRIGMIRYDVLVDDNGNIRFTGKGATHKEEGAIYAGLYSLSRGDEVWEDYFKKYPEVQENL

SEQ ID NO: 544 - protein, 558 aa, synthetic construct
DKTHTCPPCPAPEAAGAPSVFLFPPKPKDTLMISRTPEVTCVVVDVSHEDPEVKFNWYVDGVEVHNAKTKPREEQQNSTYRVVSVLTVLHQDWLNGKEYKCKVSNKALKAPIEKTISKAKGQPREPQVYTLPPSRDELTKNQVSLTCLVKGFYPSDIAVEWESNGQPENNYKTTPPVLDSDGSFFLYSKLTVDKSRWQQGNVFSCSVMHEALHNHYTQKSLSLSPGGGGSGGGGSGGGGSTALGRRKAEDRIKETLWADGVKIDEKDFEHIKSSHEDYFAVEYGKGSGYYDVNKKMDSEDTALCVGAVVTNMFHWWVDQNRENIEKFKKQDPENNGVMKFNGVKEATVDELNHFYKEYQSNKYADQSRFFDLIKKHFGNKALNPEELFELYFNGFYYGSSHRYIEDNKPAQNNLFSKVLENNKLLNPERSYGIDGFSNNVINALKSHKVLGLVHTTPLRYRHIISMWGADIDQDGKVKAIYVTDSDDREITFNDNSKRRIGMIRYDVLVDDNGNIRFTGKGATHKEEGAIYAGLYSLSRGDEVWEDYFKKYPEVQENL

SEQ ID NO: 545 - protein, 573 aa, synthetic construct
DKTHTCPPCPAPEAAGAPSVFLFPPKPKDTLMISRTPEVTCVVVDVSHEDPEVKFNWYVDGVEVHNAKTKPREEQQNSTYRVVSVLTVLHQDWLNGKEYKCKVSNKALKAPIEKTISKAKGQPREPQVYTLPPSRDELTKNQVSLTCLVKGFYPSDIAVEWESNGQPENNYKTTPPVLDSDGSFFLYSKLTVDKSRWQQGNVFSCSVMHEALHNHYTQKSLSLSPGGGGSGGGGSGGGGSGGGGSGGGGSGGGGSTALGRRKAEDRIKETLWADGVKIDEKDFEHIKSSHEDYFAVEYGKGSGYYDVNKKMDSEDTALCVGAVVTNMFHWWVDQNRENIEKFKKQDPENNGVMKFNGVKEATVDELNHFYKEYQSNKYADQSRFFDLIKKHFGNKALNPEELFELYFNGFYYGSSHRYIEDNKPAQNNLFSKVLENNKLLNPERSYGIDGFSNNVINALKSHKVLGLVHTTPLRYRHIISMWGADIDQDGKVKAIYVTDSDDREITFNDNSKRRIGMIRYDVLVDDNGNIRFTGKGATHKEEGAIYAGLYSLSRGDEVWEDYFKKYPEVQENL

SEQ ID NO: 546 - protein, 557 aa, synthetic construct
DKTHTCPPCPAPEAAGAPSVFLFPPKPKDTLMISRTPEVTCVVVDVSHEDPEVKFNWYVDGVEVHNAKTKPREEQQNSTYRVVSVLTVLHQDWLNGKEYKCKVSNKALKAPIEKTISKAKGQPREPQVYTLPPSRDELTKNQVSLTCLVKGFYPSDIAVEWESNGQPENNYKTTPPVLDSDGSFFLYSKLTVDKSRWQQGNVFSCSVMHEALHNHYTQKSLSLSPGGGGSGGGGSGGGGSTALGRRKAEQRIKETLWADGVKIDEKDFEHIKSSHEDYFAVEYGKGSGYYDVNKKMDSEDTALCVGAVVTNMFHWWVDQNRENIEKFKKQDPENNGVMKFEGVKEATVDELNHFYRDNRDNYADQSRFFDLIKKHFGNKALNPEELFELYFNGFYYGSSHRYIEDNEPAQNNLFSKVLENNKLLNPERSYGIDGFSNNVINALKSHKVLGLVHTTPLRYRHIISMWGADIDQDGKVKAIYVTDSDDREITFNDNSKRRIGMIRYDVLVDDNGNIRFTGKGATHKEEGAIYAGLYSLSRGDEVWEDYFKKYPEVQENL

SEQ ID NO: 547 - protein, 557 aa, synthetic construct
DKTHTCPPCPAPEAAGAPSVFLFPPKPKDTLMISRTPEVTCVVVDVSHEDPEVKFNWYVDGVEVHNAKTKPREEQQNSTYRVVSVLTVLHQDWLNGKEYKCKVSNKALKAPIEKTISKAKGQPREPQVYTLPPSRDELTKNQVSLTCLVKGFYPSDIAVEWESNGQPENNYKTTPPVLDSDGSFFLYSKLTVDKSRWQQGNVFSCSVMHEALHNHYTQKSLSLSPGGGGSGGGGSGGGGSTALGRRKAEDRIKETLWADGVKIDEKDFEHIKSSHEDYFAVEYGKGSGYYDVNKKMDSEDSALCVGAVVTNMFHWWVDQNRENIEKFKKQDPENNGVMKFEGVKEATVDELNHFYRDNRDNYADQSRFFDLIKKHFGNKALNPEELFELYFNGFYYGSSHRYIEDNEPAQNNLFSKVLENNKLLNPERSYGIDGFSNNVINALKSHKVLGLVYTTPLRYRHIISMWGADIDQDGKVKAIYVTDSDDREITFNDNSKRRIGMIRYDVLVDDNGNIRFTGKGATHKEEGAIYAGLYSLSRGDEVWEDYFKKYPEVQENL

SEQ ID NO: 548 - protein, 557 aa, synthetic construct
DKTHTCPPCPAPEAAGAPSVFLFPPKPKDTLMISRTPEVTCVVVDVSHEDPEVKFNWYVDGVEVHNAKTKPREEQQNSTYRVVSVLTVLHQDWLNGKEYKCKVSNKALKAPIEKTISKAKGQPREPQVYTLPPSRDELTKNQVSLTCLVKGFYPSDIAVEWESNGQPENNYKTTPPVLDSDGSFFLYSKLTVDKSRWQQGNVFSCSVMHEALHNHYTQKSLSLSPGGGGSGGGGSGGGGSTALGRRKAEDRIKETLWADGVKIDEKDFEHIKSSHEDYFAVEYGKGSGYYDVNKKMDSEDTALCVGAVVTNMFHWWVDQNRENIEKFKKQDPENNGVMKFEGVKEATVDELNHFYRDNRDNYADQSRFFDLIKKHFGNKALNPEELFELYFNGFYYGSSHRYIEDNEPAQNNLFSKVLENNKLLNPERSYGIDGFSNNVINALKSHKVLGLVYTTPLRYRHIISMWGADIDQDGKVKAIYVTDSDDREITFNDNSSRRIGMIRYDVLVDDNGNIRFTGKGATHKEEGAIYAGLYSLSRGDEVWEDYFKKYPEVQENL

SEQ ID NO: 549 - protein, 557 aa, synthetic construct
DKTHTCPPCPAPEAAGAPSVFLFPPKPKDTLMISRTPEVTCVVVDVSHEDPEVKFNWYVDGVEVHNAKTKPREEQQNSTYRVVSVLTVLHQDWLNGKEYKCKVSNKALKAPIEKTISKAKGQPREPQVYTLPPSRDELTKNQVSLTCLVKGFYPSDIAVEWESNGQPENNYKTTPPVLDSDGSFFLYSKLTVDKSRWQQGNVFSCSVMHEALHNHYTQKSLSLSPGGGGSGGGGSGGGGSTALGRRKAEDRIKETLWADGVKIDEKDFEHIKSSHEDYFAVEYGKGSGYYDVNKKMDSEDTALCVGAVVTNMFHWWVDQNRENIEKFKKQDPENNGVMKFEGVKEATVDELNHFYRDNRDNYADQSRFFDLIKKHFGNKALNPEELFELYFNGFYYGSSHRYIEDNEPAQNNLFSKVLENNKLLNPERSYGIDGFSNNVINALKSHKVLGLVHTTPLRYRHIISMWGADIDQDGKVKAIYVTDSDDREITFNDNSSRRIGMIRYDVLVDDNGNIRFTGKGATHKEEGAIYAGLYSLSRGDEVWEDYFKKYPEVQENL

SEQ ID NO: 550 - protein, 557 aa, synthetic construct
DKTHTCPPCPAPEAAGAPSVFLFPPKPKDTLMISRTPEVTCVVVDVSHEDPEVKFNWYVDGVEVHNAKTKPREEQQNSTYRVVSVLTVLHQDWLNGKEYKCKVSNKALKAPIEKTISKAKGQPREPQVYTLPPSRDELTKNQVSLTCLVKGFYPSDIAVEWESNGQPENNYKTTPPVLDSDGSFFLYSKLTVDKSRWQQGNVFSCSVMHEALHNHYTQKSLSLSPGGGGSGGGGSGGGGSTALGRRKAEDRIKETLWADGVKIDEKDFEHIKSSHEDYFAVEYGKGSGYYDVNKKMDSEDTALCVGAVVTNMFHWWVDQNRENIEKFKKQDPENNGVMKFNGVKEATVDELNHFYRDNRDNYADQSRFFDLIKKHFGNKALNPEELFELYFNGFYYGSSHRYIEDNKPAQNNLFSKVLENNKLLNPERSYGIDGFSNNVINALKSHKVLGLVYTTPLRYRHIISMWGADIDQDGKVKAIYVTDSDDREITFNDNSKRRIGMIRYDVLVDDNGNIRFTGKGATHKEEGAIYAGLYSLSRGDEVWEDYFKKYPEVQENL

SEQ ID NO: 551 - protein, 557 aa, synthetic construct
DKTHTCPPCPAPEAAGAPSVFLFPPKPKDTLMISRTPEVTCVVVDVSHEDPEVKFNWYVDGVEVHNAKTKPREEQQNSTYRVVSVLTVLHQDWLNGKEYKCKVSNKALKAPIEKTISKAKGQPREPQVYTLPPSRDELTKNQVSLTCLVKGFYPSDIAVEWESNGQPENNYKTTPPVLDSDGSFFLYSKLTVDKSRWQQGNVFSCSVMHEALHNHYTQKSLSLSPGGGGSGGGGSGGGGSTALGRRKAEDRIKETLWADGVKIDEKDFEHIKSSHEDYFAVEYGKGSGYYDVNKKMDSEDSALCVGAVVTNMFHWWVDQNRENIEKFKKQDPENNGVMKFNGVKEATVDELNHFYRDNRDNYADQSRFFDLIKKHFGNKALNPEELFELYFNGFYYGSSHRYIEDNKPAQNNLFSKVLENNKLLNPERSYGIDGFSNNVINALKSHKVLGLVHTTPLRYRHIISMWGADIDQDGKVKAIYVTDSDDREITFNDNSKRRIGMIRYDVLVDDNGNIRFTGKGATHKEEGAIYAGLYSLSRGDEVWEDYFKKYPEVQENL

SEQ ID NO: 552 - protein, 557 aa, synthetic construct
DKTHTCPPCPAPEAAGAPSVFLFPPKPKDTLMISRTPEVTCVVVDVSHEDPEVKFNWYVDGVEVHNAKTKPREEQQNSTYRVVSVLTVLHQDWLNGKEYKCKVSNKALKAPIEKTISKAKGQPREPQVYTLPPSRDELTKNQVSLTCLVKGFYPSDIAVEWESNGQPENNYKTTPPVLDSDGSFFLYSKLTVDKSRWQQGNVFSCSVMHEALHNHYTQKSLSLSPGGGGSGGGGSGGGGSTALGRRKAEQRIKETLWADGVKIDEKDFEHIKSSHEDYFAVEYGKGSGYYDVNKKMDSEDTALCVGAVVTNMFHWWVDQNRENIEKFKKQDPENNGVMKFNGVKEATVDELNHFYRDNRDNYADQSRFFDLIKKHFGNKALNPEELFELYFNGFYYGSSHRYIEDNKPAQNNLFSKVLENNKLLNPERSYGIDGFSNNVINALKSHKVLGLVHTTPLRYRHIISMWGADIDQDGKVKAIYVTDSDDREITFNDNSKRRIGMIRYDVLVDDNGNIRFTGKGATHKEEGAIYAGLYSLSRGDEVWEDYFKKYPEVQENL

SEQ ID NO: 553 - protein, 557 aa, synthetic construct
DKTHTCPPCPAPEAAGAPSVFLFPPKPKDTLMISRTPEVTCVVVDVSHEDPEVKFNWYVDGVEVHNAKTKPREEQQNSTYRVVSVLTVLHQDWLNGKEYKCKVSNKALKAPIEKTISKAKGQPREPQVYTLPPSRDELTKNQVSLTCLVKGFYPSDIAVEWESNGQPENNYKTTPPVLDSDGSFFLYSKLTVDKSRWQQGNVFSCSVMHEALHNHYTQKSLSLSPGGGGSGGGGSGGGGSTALGRRKAEDRIKETLWADGVKIDEKDFEHIKSSHEDYFAVEYGKGSGYYDVNKKMDSEDTALCVGAVVTNMFHWWVDQNRENIEKFKKQDPENNGVMKFEGVKEATVDELNHFYRDNRDNYADQSRFFDLIKKHFGNKALNPEELFELYFNGFYYQSSHRYIEDNEPAQNNLFSKVLENNKLLNPERSYGIDGFSNNVINALKSHKVLGLVHTTPLRYRHIISMWGADIDQDGKVKAIYVTDSDDREITFNDNSKRRIGMIRYDVLVDDNGNIRFTGKGATHKEEGAIYAGLYSLSRGDEVWEDYFKKYPEVQENL

SEQ ID NO: 554 - protein, 557 aa, synthetic construct
DKTHTCPPCPAPEAAGAPSVFLFPPKPKDTLMISRTPEVTCVVVDVSHEDPEVKFNWYVDGVEVHNAKTKPREEQQNSTYRVVSVLTVLHQDWLNGKEYKCKVSNKALKAPIEKTISKAKGQPREPQVYTLPPSRDELTKNQVSLTCLVKGFYPSDIAVEWESNGQPENNYKTTPPVLDSDGSFFLYSKLTVDKSRWQQGNVFSCSVMHEALHNHYTQKSLSLSPGGGGSGGGGSGGGGSTALGRRKAEQRIKETLWADGVKIDEKDFEHIKSSHEDYFAVEYGKGSGYYDVNKKMDSEDTALCVGAVVTNMFHWWVDQNRENIEKFKKQDPENNGVMKFEGVKEATVDELNHFYRDNRDNYADQSRFFDLIKKHFGNKALNPEELFELYFNGFYYQSSHRYIEDNEPAQNNLFSKVLENNKLLNPERSYGIDGFSNNVINALKSHKVLGLVHTTPLRYRHIISMWGADIDQDGKVKAIYVTDSDDREITFNDNSKRRIGMIRYDVLVDDNGNIRFTGKGATHKEEGAIYAGLYSLSRGDEVWEDYFKKYPEVQENL

SEQ ID NO: 555 - protein, 557 aa, synthetic construct
DKTHTCPPCPAPEAAGAPSVFLFPPKPKDTLMISRTPEVTCVVVDVSHEDPEVKFNWYVDGVEVHNAKTKPREEQQNSTYRVVSVLTVLHQDWLNGKEYKCKVSNKALKAPIEKTISKAKGQPREPQVYTLPPSRDELTKNQVSLTCLVKGFYPSDIAVEWESNGQPENNYKTTPPVLDSDGSFFLYSKLTVDKSRWQQGNVFSCSVMHEALHNHYTQKSLSLSPGGGGSGGGGSGGGGSTALGRRKAEDRIKETLWADGVKIDEKDFEHIKSSHEDYFAVEYGKGSGYYDVNKKMDSEDTALCVGAVVTNMFHWWVDQNRENIEKFKKQDPENNGVMKFEGVKEATVDELNHFYRDNRDNYADQSRFFDLIKKHFGNKALNPEELFELYFNGFYYQSSHRYIEDNEPAQNNLFSKVLENNKLLNPERSYGIDGFSNNVINALKSHKVLGLVYTTPLRYRHIISMWGADIDQDGKVKAIYVTDSDDREITFNDNSKRRIGMIRYDVLVDDNGNIRFTGKGATHKEEGAIYAGLYSLSRGDEVWEDYFKKYPEVQENL

SEQ ID NO: 556 - protein, 557 aa, synthetic construct
DKTHTCPPCPAPEAAGAPSVFLFPPKPKDTLMISRTPEVTCVVVDVSHEDPEVKFNWYVDGVEVHNAKTKPREEQQNSTYRVVSVLTVLHQDWLNGKEYKCKVSNKALKAPIEKTISKAKGQPREPQVYTLPPSRDELTKNQVSLTCLVKGFYPSDIAVEWESNGQPENNYKTTPPVLDSDGSFFLYSKLTVDKSRWQQGNVFSCSVMHEALHNHYTQKSLSLSPGGGGSGGGGSGGGGSTALGRRKAEDRIKETLWADGVKIDEKDFEHIKSSHEDYFAVEYGKGSGYYDVNKKMDSEDSALCVGAVVTNMFHWWVDQNRENIEKFKKQDPENNGVMKFEGVKEATVDELNHFYRDNRDNYADQSRFFDLIKKHFGNKALNPEELFELYFNGFYYQSSHRYIEDNEPAQNNLFSKVLENNKLLNPERSYGIDGFSNNVINALKSHKVLGLVHTTPLRYRHIISMWGADIDQDGKVKAIYVTDSDDREITFNDNSKRRIGMIRYDVLVDDNGNIRFTGKGATHKEEGAIYAGLYSLSRGDEVWEDYFKKYPEVQENL

SEQ ID NO: 557 - protein, 557 aa, synthetic construct
DKTHTCPPCPAPEAAGAPSVFLFPPKPKDTLMISRTPEVTCVVVDVSHEDPEVKFNWYVDGVEVHNAKTKPREEQQNSTYRVVSVLTVLHQDWLNGKEYKCKVSNKALKAPIEKTISKAKGQPREPQVYTLPPSRDELTKNQVSLTCLVKGFYPSDIAVEWESNGQPENNYKTTPPVLDSDGSFFLYSKLTVDKSRWQQGNVFSCSVMHEALHNHYTQKSLSLSPGGGGSGGGGSGGGGSTALGRRKAEDRIKETLWADGVKIDEKDFEHIKSSHEDYFAVEYGKGSGYYDVNKKMDSEDTALCVGAVVTNMFHWWVDQNRENIEKFKKQDPENNGVMKFEGVKEATVDELNHFYRDNRDNYADQSRFFDLIKKHFGNKALNPEELFELYFNGFYYQSSHRYIEDNEPAQNNLFSKVLENNKLLNPERSYGIDGFSNNVINALKSHKVLGLVYTTPLTYRHIISMWGADIDQDGKVKAIYVTDSDDREITFNDNSKRRIGMIRYDVLVDDNGNIRFTGKGATHKEEGAIYAGLYSLSRGDEVWEDYFKKYPEVQENL

SEQ ID NO: 558 - protein, 557 aa, synthetic construct
DKTHTCPPCPAPEAAGAPSVFLFPPKPKDTLMISRTPEVTCVVVDVSHEDPEVKFNWYVDGVEVHNAKTKPREEQQNSTYRVVSVLTVLHQDWLNGKEYKCKVSNKALKAPIEKTISKAKGQPREPQVYTLPPSRDELTKNQVSLTCLVKGFYPSDIAVEWESNGQPENNYKTTPPVLDSDGSFFLYSKLTVDKSRWQQGNVFSCSVMHEALHNHYTQKSLSLSPGGGGSGGGGSGGGGSTALGRRKAEDRIKETLWADGVKIDEKDFEHIKSSHEDYFAVEYGKGSGYYDVNKKMDSEDSALCVGAVVTNMFHWWVDQNRENIEKFKKQDPENNGVMKFEGVKEATVDELNHFYRDNRDNYADQSRFFDLIKKHFGNKALNPEELFELYFNGFYYQSSHRYIEDNEPAQNNLFSKVLENNKLLNPERSYGIDGFSNNVINALKSHKVLGLVHTTPLTYRHIISMWGADIDQDGKVKAIYVTDSDDREITFNDNSKRRIGMIRYDVLVDDNGNIRFTGKGATHKEEGAIYAGLYSLSRGDEVWEDYFKKYPEVQENL

SEQ ID NO: 559 - protein, 557 aa, synthetic construct
DKTHTCPPCPAPEAAGAPSVFLFPPKPKDTLMISRTPEVTCVVVDVSHEDPEVKFNWYVDGVEVHNAKTKPREEQQNSTYRVVSVLTVLHQDWLNGKEYKCKVSNKALKAPIEKTISKAKGQPREPQVYTLPPSRDELTKNQVSLTCLVKGFYPSDIAVEWESNGQPENNYKTTPPVLDSDGSFFLYSKLTVDKSRWQQGNVFSCSVMHEALHNHYTQKSLSLSPGGGGSGGGGSGGGGSTALGRRKAEDRIKETLWADGVKIDEKDFEHIKSSHEDYFAVEYGKGSGYYDVNKKMDSEDSALCVGAVVTNMFHWWVDQNRENIEKFKKQDPENNGVMKFEGVKEATVDELNHFYRDNRDNYADQSRFFDLIKKHFGNKALNPEELFELYFNGFYYQSSHRYIEDNEPAQNNLFSKVLENNKLLNPERSYGIDGFSNNVINALKSHKVLGLVYTTPLRYRHIISMWGADIDQDGKVKAIYVTDSDDREITFNDNSKRRIGMIRYDVLVDDNGNIRFTGKGATHKEEGAIYAGLYSLSRGDEVWEDYFKKYPEVQENL

SEQ ID NO: 560 - protein, 557 aa, synthetic construct
DKTHTCPPCPAPEAAGAPSVFLFPPKPKDTLMISRTPEVTCVVVDVSHEDPEVKFNWYVDGVEVHNAKTKPREEQQNSTYRVVSVLTVLHQDWLNGKEYKCKVSNKALKAPIEKTISKAKGQPREPQVYTLPPSRDELTKNQVSLTCLVKGFYPSDIAVEWESNGQPENNYKTTPPVLDSDGSFFLYSKLTVDKSRWQQGNVFSCSVMHEALHNHYTQKSLSLSPGGGGSGGGGSGGGGSTALGRRKAEDRIKETLWADGVKIDEKDFEHIKSSHEDYFAVEYGKGSGYYDVNKKMDSEDTALCVGAVVTNMFHWWVDQNRENIEKFKKQDPENNGVMKFEGVKEATVDELNHFYRDNRDNYADQSRFFDLIKKHFGNKALNPEELFELYFNGFYYQSSHRYIEDNEPAQNNLFSKVLENNKLLNPERSYGIDGFSNNVINALKSHKVLGLVYTTPLRYRHIISMWGADIDQDGKVKAIYVTDSDDREITFNDNSSRRIGMIRYDVLVDDNGNIRFTGKGATHKEEGAIYAGLYSLSRGDEVWEDYFKKYPEVQENL

SEQ ID NO: 561 - protein, 557 aa, synthetic construct
DKTHTCPPCPAPEAAGAPSVFLFPPKPKDTLMISRTPEVTCVVVDVSHEDPEVKFNWYVDGVEVHNAKTKPREEQQNSTYRVVSVLTVLHQDWLNGKEYKCKVSNKALKAPIEKTISKAKGQPREPQVYTLPPSRDELTKNQVSLTCLVKGFYPSDIAVEWESNGQPENNYKTTPPVLDSDGSFFLYSKLTVDKSRWQQGNVFSCSVMHEALHNHYTQKSLSLSPGGGGSGGGGSGGGGSTALGRRKAEDRIKETLWADGVKIDEKDFEHIKSSHEDYFAVEYGKGSGYYDVNKKMDSEDTALCVGAVVTNMFHWWVDQNRENIEKFKKQDPENNGVMKFEGVKEATVDELNHFYRDNRDNYADQSRFFDLIKKHFGNKALNPEELFELYFNGFYYQSSHRYIEDNEPAQNNLFSKVLENNKLLNPERSYGIDGFSNNVINALKSHKVLGLVHTTPLRYRHIISMWGADIDQDGKVKAIYVTDSDDREITFNDNSSRRIGMIRYDVLVDDNGNIRFTGKGATHKEEGAIYAGLYSLSRGDEVWEDYFKKYPEVQENL

SEQ ID NO: 562 - protein, 557 aa, synthetic construct
DKTHTCPPCPAPEAAGAPSVFLFPPKPKDTLMISRTPEVTCVVVDVSHEDPEVKFNWYVDGVEVHNAKTKPREEQQNSTYRVVSVLTVLHQDWLNGKEYKCKVSNKALKAPIEKTISKAKGQPREPQVYTLPPSRDELTKNQVSLTCLVKGFYPSDIAVEWESNGQPENNYKTTPPVLDSDGSFFLYSKLTVDKSRWQQGNVFSCSVMHEALHNHYTQKSLSLSPGGGGSGGGGSGGGGSTALGRRKAEDRIKETLWADGVKIDEKDFEHIKSSHEDYFAVEYGKGSGYYDVNKKMDSEDTALCVGAVVTNMFHWWVDQNRENIEKFKKQDPENNGVMKFNGVKEATVDELNHFYRDNRDNYADQSRFFDLIKKHFGNKALNPEELFELYFNGFYYQSSHRYIEDNKPAQNNLFSKVLENNKLLNPERSYGIDGFSNNVINALKSHKVLGLVYTTPLRYRHIISMWGADIDQDGKVKAIYVTDSDDREITFNDNSKRRIGMIRYDVLVDDNGNIRFTGKGATHKEEGAIYAGLYSLSRGDEVWEDYFKKYPEVQENL

SEQ ID NO: 563 - protein, 557 aa, synthetic construct
DKTHTCPPCPAPEAAGAPSVFLFPPKPKDTLMISRTPEVTCVVVDVSHEDPEVKFNWYVDGVEVHNAKTKPREEQQNSTYRVVSVLTVLHQDWLNGKEYKCKVSNKALKAPIEKTISKAKGQPREPQVYTLPPSRDELTKNQVSLTCLVKGFYPSDIAVEWESNGQPENNYKTTPPVLDSDGSFFLYSKLTVDKSRWQQGNVFSCSVMHEALHNHYTQKSLSLSPGGGGSGGGGSGGGGSTALGRRKAEDRIKETLWADGVKIDEKDFEHIKSSHEDYFAVEYGKGSGYYDVNKKMDSEDSALCVGAVVTNMFHWWVDQNRENIEKFKKQDPENNGVMKFNGVKEATVDELNHFYRDNRDNYADQSRFFDLIKKHFGNKALNPEELFELYFNGFYYQSSHRYIEDNKPAQNNLFSKVLENNKLLNPERSYGIDGFSNNVINALKSHKVLGLVHTTPLRYRHIISMWGADIDQDGKVKAIYVTDSDDREITFNDNSKRRIGMIRYDVLVDDNGNIRFTGKGATHKEEGAIYAGLYSLSRGDEVWEDYFKKYPEVQENL

SEQ ID NO: 564 - protein, 557 aa, synthetic construct
DKTHTCPPCPAPEAAGAPSVFLFPPKPKDTLMISRTPEVTCVVVDVSHEDPEVKFNWYVDGVEVHNAKTKPREEQQNSTYRVVSVLTVLHQDWLNGKEYKCKVSNKALKAPIEKTISKAKGQPREPQVYTLPPSRDELTKNQVSLTCLVKGFYPSDIAVEWESNGQPENNYKTTPPVLDSDGSFFLYSKLTVDKSRWQQGNVFSCSVMHEALHNHYTQKSLSLSPGGGGSGGGGSGGGGSTALGRRKAEQRIKETLWADGVKIDEKDFEHIKSSHEDYFAVEYGKGSGYYDVNKKMDSEDTALCVGAVVTNMFHWWVDQNRENIEKFKKQDPENNGVMKFNGVKEATVDELNHFYRDNRDNYADQSRFFDLIKKHFGNKALNPEELFELYFNGFYYQSSHRYIEDNKPAQNNLFSKVLENNKLLNPERSYGIDGFSNNVINALKSHKVLGLVHTTPLRYRHIISMWGADIDQDGKVKAIYVTDSDDREITFNDNSKRRIGMIRYDVLVDDNGNIRFTGKGATHKEEGAIYAGLYSLSRGDEVWEDYFKKYPEVQENL

SEQ ID NO: 565 - protein, 557 aa, synthetic construct
DKTHTCPPCPAPEAAGAPSVFLFPPKPKDTLMISRTPEVTCVVVDVSHEDPEVKFNWYVDGVEVHNAKTKPREEQQNSTYRVVSVLTVLHQDWLNGKEYKCKVSNKALKAPIEKTISKAKGQPREPQVYTLPPSRDELTKNQVSLTCLVKGFYPSDIAVEWESNGQPENNYKTTPPVLDSDGSFFLYSKLTVDKSRWQQGNVFSCSVMHEALHNHYTQKSLSLSPGGGGSGGGGSGGGGSTALGRRKAEDRIKETLWADGVKIDEKDFEHIKSSHEDYFAVEYGKGSGYYDVNKKMDSEDTALCVGAVVTNMFHWWVDQNRENIEKFKKQDPENNGVMKFEGVKEATVDELNHFYRDNRDNYADQSRFFDLIKKHFGNKALNPEELFELYFNGFYYNSSHRYIEDNEPAQNNLFSKVLENNKLLNPERSYGIDGFSNNVINALKSHKVLGLVHTTPLRYRHIISMWGADIDQDGKVKAIYVTDSDDREITFNDNSKRRIGMIRYDVLVDDNGNIRFTGKGATHKEEGAIYAGLYSLSRGDEVWEDYFKKYPEVQENL

SEQ ID NO: 566 - protein, 557 aa, synthetic construct
DKTHTCPPCPAPEAAGAPSVFLFPPKPKDTLMISRTPEVTCVVVDVSHEDPEVKFNWYVDGVEVHNAKTKPREEQQNSTYRVVSVLTVLHQDWLNGKEYKCKVSNKALKAPIEKTISKAKGQPREPQVYTLPPSRDELTKNQVSLTCLVKGFYPSDIAVEWESNGQPENNYKTTPPVLDSDGSFFLYSKLTVDKSRWQQGNVFSCSVMHEALHNHYTQKSLSLSPGGGGSGGGGSGGGGSTALGRRKAEDRIKETLWADGVKIDEKDFEHIKSSHEDYFAVEYGKGSGYYDVNKKMDSEDTALCVGAVVTNMFHWWVDQNRENIEKFKKQDPENNGVMKFEGVKEATVDELNHFYRDNRDNYADQSRFFDLIKKHFGNKALNPEELFELYFNGFYYNSSHRYIEDNEPAQNNLFSKVLENNKLLNPERSYGIDGFSNNVINALKSHKVLGLVYTTPLRYRHIISMWGADIDQDGKVKAIYVTDSDDREITFNDNSKRRIGMIRYDVLVDDNGNIRFTGKGATHKEEGAIYAGLYSLSRGDEVWEDYFKKYPEVQENL

SEQ ID NO: 567 - protein, 557 aa, synthetic construct
DKTHTCPPCPAPEAAGAPSVFLFPPKPKDTLMISRTPEVTCVVVDVSHEDPEVKFNWYVDGVEVHNAKTKPREEQQNSTYRVVSVLTVLHQDWLNGKEYKCKVSNKALKAPIEKTISKAKGQPREPQVYTLPPSRDELTKNQVSLTCLVKGFYPSDIAVEWESNGQPENNYKTTPPVLDSDGSFFLYSKLTVDKSRWQQGNVFSCSVMHEALHNHYTQKSLSLSPGGGGSGGGGSGGGGSTALGRRKAEDRIKETLWADGVKIDEKDFEHIKSSHEDYFAVEYGKGSGYYDVNKKMDSEDTALCVGAVVTNMFHWWVDQNRENIEKFKKQDPENNGVMKFEGVKEATVDELNEFYRDNRDNYADQSRFFDLIKKHFPNKALNPEELFELYFNGFYYGSSHRYIEDNEPAQNNLFSKVLENNKLLNPERSYGIDGFSNNVINALKSHKVLGLVYTTPLRYRHIISMWGADIDQDGKVKAIYVTDSDDREITFNDNSKRRIGMIRYDVLVDDNGNIRFTGKGATHKEEGAIYAGLYSLSRGDEVWEDYFKKYPEVQENL

SEQ ID NO: 568 - protein, 557 aa, synthetic construct
DKTHTCPPCPAPEAAGAPSVFLFPPKPKDTLMISRTPEVTCVVVDVSHEDPEVKFNWYVDGVEVHNAKTKPREEQQNSTYRVVSVLTVLHQDWLNGKEYKCKVSNKALKAPIEKTISKAKGQPREPQVYTLPPSRDELTKNQVSLTCLVKGFYPSDIAVEWESNGQPENNYKTTPPVLDSDGSFFLYSKLTVDKSRWQQGNVFSCSVMHEALHNHYTQKSLSLSPGGGGSGGGGSGGGGSTALGRRKAEDRIKETLWADGVKIDEKDFEHIKSSHEDYFAVEYGKGSGYYDVNKKMDSEDTALCVGAVVTNMFHWWVDQNRENIEKFKKQDPENNGVMKFEGVKEATVDELNEFYRDNRDNYADQSRFFDLIKKHFPNKALNPEELFELYFNGFYYGSSHRYIEDNEPAQNNLFSKVLENNKLLNPERSYGIDGFSNNVKNALKSHKVLGLVYTTPLRYRHIISMWGADIDQDGKVKAIYVTDSDDREITFNDNSKRRIGMIRYDVLVDDNGNIRFTGKGATHKEEGAIYAGLYSLSRGDEVWEDYFKKYPEVQENL

SEQ ID NO: 569 - protein, 557 aa, synthetic construct
DKTHTCPPCPAPEAAGAPSVFLFPPKPKDTLMISRTPEVTCVVVDVSHEDPEVKFNWYVDGVEVHNAKTKPREEQQNSTYRVVSVLTVLHQDWLNGKEYKCKVSNKALKAPIEKTISKAKGQPREPQVYTLPPSRDELTKNQVSLTCLVKGFYPSDIAVEWESNGQPENNYKTTPPVLDSDGSFFLYSKLTVDKSRWQQGNVFSCSVMHEALHNHYTQKSLSLSPGGGGSGGGGSGGGGSTALGRRKAEDRIKETLWADGVKIDEKDFEHIKSSHEDYFAVEYGKGSGYYDVNKKMDSEDTALCVGAVVTNMFHWWVDQNRENIEKFKKQDPENNGVMKFEGVKEATVDELNEFYRDNRDNYADQSRFFDLIKKHFPNKALNPEELFELYFNGFYYGSSHRYIEDNEPAQNNLFSKVLENNKLLNPERSYGIDGFSNNVINALKSHKVLGLVYTTPLRYGHIISMWGADIDQDGKVKAIYVTDSDDREITFNDNSKRRIGMIRYDVLVDDNGNIRFTGKGATHKEEGAIYAGLYSLSRGDEVWEDYFKKYPEVQENL

SEQ ID NO: 570 - protein, 557 aa, synthetic construct
DKTHTCPPCPAPEAAGAPSVFLFPPKPKDTLMISRTPEVTCVVVDVSHEDPEVKFNWYVDGVEVHNAKTKPREEQQNSTYRVVSVLTVLHQDWLNGKEYKCKVSNKALKAPIEKTISKAKGQPREPQVYTLPPSRDELTKNQVSLTCLVKGFYPSDIAVEWESNGQPENNYKTTPPVLDSDGSFFLYSKLTVDKSRWQQGNVFSCSVMHEALHNHYTQKSLSLSPGGGGSGGGGSGGGGSTALGRRKAEDRIKETLWADGVKIDEKDFEHIDSSHEDYFAVEYGKGSGYYDVNKKMDSEDTALCVGAVVTNMFHWWVDQNRENIEKFKEQDPENNGVMKFEGVKEATVDELNEFYRDNRDNYADQSRFFDLIKKHFPNKALNPEELFELYFNGFYYGSSHRYIEDNEPAQNNLFSKVLENNKLLNPERSYGIDGFSNNVINALKSHKVLGLVYTTPLRYGHIISMWGADIDQDGKVKAIYVTDSDDREITFNDNSKRRIGMIRYDVLVDDNGNIRFTGKGATHKEEGAIYAGLYSLSRGDEVWEDYFKKYPEVQENL

SEQ ID NO: 571 - protein, 557 aa, synthetic construct
DKTHTCPPCPAPEAAGAPSVFLFPPKPKDTLMISRTPEVTCVVVDVSHEDPEVKFNWYVDGVEVHNAKTKPREEQQNSTYRVVSVLTVLHQDWLNGKEYKCKVSNKALKAPIEKTISKAKGQPREPQVYTLPPSRDELTKNQVSLTCLVKGFYPSDIAVEWESNGQPENNYKTTPPVLDSDGSFFLYSKLTVDKSRWQQGNVFSCSVMHEALHNHYTQKSLSLSPGGGGSGGGGSGGGGSTALGRRKAEDRIKETLWADGVKIDEKDFEHIKSSHEDYFAVEYGKGSGYYDVNKKMDSEDTALCVGAVVTNMFHWWVEQNRENIEKFKKQDPENNGVMKFEGVKEATVDELNEFYRDNRDNYADQSRFFDLIKKHFPNKALNPEELFELYFNGFYYGSSHRYIEDNEPAQNNLFSKVLDNNKLLNPERSYGIDGFSNNVINALKSHKVLGLVYTTPLRYGHIISMWGADIDQDGKVKAIYVTDSDDREITFNDNSKRRIGMIRYDVLVDDNGNIRFTGKGATHKEEGAIYAGLYSLSRGDEVWEDYFKKYPEVQENL

SEQ ID NO: 572 - protein, 557 aa, synthetic construct
DKTHTCPPCPAPEAAGAPSVFLFPPKPKDTLMISRTPEVTCVVVDVSHEDPEVKFNWYVDGVEVHNAKTKPREEQQNSTYRVVSVLTVLHQDWLNGKEYKCKVSNKALKAPIEKTISKAKGQPREPQVYTLPPSRDELTKNQVSLTCLVKGFYPSDIAVEWESNGQPENNYKTTPPVLDSDGSFFLYSKLTVDKSRWQQGNVFSCSVMHEALHNHYTQKSLSLSPGGGGSGGGGSGGGGSTALGRRKAEDRIKETLWADGVKIDEKDFEHIKSSHEDYFAVEYGKGSGYYDVNKKMDSEDTALCVGAVVTNMFHWWVDQNRENIEKFKKQDPENNGVMKFEGVKEATVDELNEFYRDNRDNYADQSRFFDLIKKHFPNKALNPEELFELYFNGFYYGSSHRYIEDNEPAQNNLFSKVLENNKLLNPERSYGIDGFSNNVINALKSHKVLGLVYTTPLRYGHIISMWGADIDQDGKVKAIYVTDSDDREITFNDNSKRRIGMIRYDVLVDDNGNIRFTGKGKTHKEEGAIYAGLYSLSLGDEVWEDYFKKYPEVQENL

SEQ ID NO: 573 - protein, 557 aa, synthetic construct
DKTHTCPPCPAPEAAGAPSVFLFPPKPKDTLMISRTPEVTCVVVDVSHEDPEVKFNWYVDGVEVHNAKTKPREEQQNSTYRVVSVLTVLHQDWLNGKEYKCKVSNKALKAPIEKTISKAKGQPREPQVYTLPPSRDELTKNQVSLTCLVKGFYPSDIAVEWESNGQPENNYKTTPPVLDSDGSFFLYSKLTVDKSRWQQGNVFSCSVMHEALHNHYTQKSLSLSPGGGGSGGGGSGGGGSTALGRRKAEDRIKETLWADGVKIDEKDFEHIKSSHEDYFAVEYGKGSGYYDVNKKMDSEDTALCVGAVVTNMFHWWVEQNRENIEKFKKQDPENNGVMKFEGVKEATVDELNEFYRDNRDNYADQSRFFDLIKKHFPNKALNPEELFELYFNGFYYGSSHRYIEDNEPAQNNLFSKVLDNNKLLNPERSYGIDGFSNNVINALKSHKVLGLVYTTPLRYGHIISMWGADIDQDGKVKAIYVTDSDDREITFNDNSKRRIGMIRYDVLVDDNGNIRFTGKGKTHKEEGAIYAGLYSLSLGDEVWEDYFKKYPEVQENL

SEQ ID NO: 574 - protein, 557 aa, synthetic construct
DKTHTCPPCPAPEAAGAPSVFLFPPKPKDTLMISRTPEVTCVVVDVSHEDPEVKFNWYVDGVEVHNAKTKPREEQQNSTYRVVSVLTVLHQDWLNGKEYKCKVSNKALKAPIEKTISKAKGQPREPQVYTLPPSRDELTKNQVSLTCLVKGFYPSDIAVEWESNGQPENNYKTTPPVLDSDGSFFLYSKLTVDKSRWQQGNVFSCSVMHEALHNHYTQKSLSLSPGGGGSGGGGSGGGGSTALGRRKAEDRIKETLWADGVKIDEKDFEHIDSSHEDYFAVEYGKGSGYYDVNKKMDSEDTALCVGAVVTNMFHWWVEQNRENIEKFKEQDPENNGVMKFEGVKEATVDELNEFYRDNRDNYADQSRFFDLIKKHFPNKALNPEELFELYFNGFYYGSSHRYIEDNEPAQNNLFSKVLDNNKLLNPERSYGIDGFSNNVINALKSHKVLGLVYTTPLRYGHIISMWGADIDQDGKVKAIYVTDSDDREITFNDNSKRRIGMIRYDVLVDDNGNIRFTGKGATHKEEGAIYAGLYSLSRGDEVWEDYFKKYPEVQENL

SEQ ID NO: 575 - protein, 557 aa, synthetic construct
DKTHTCPPCPAPEAAGAPSVFLFPPKPKDTLMISRTPEVTCVVVDVSHEDPEVKFNWYVDGVEVHNAKTKPREEQQNSTYRVVSVLTVLHQDWLNGKEYKCKVSNKALKAPIEKTISKAKGQPREPQVYTLPPSRDELTKNQVSLTCLVKGFYPSDIAVEWESNGQPENNYKTTPPVLDSDGSFFLYSKLTVDKSRWQQGNVFSCSVMHEALHNHYTQKSLSLSPGGGGSGGGGSGGGGSTALGRRKAEDRIKETLWADGVKIDEKDFEHIDSSHEDYFAVEYGKGSGYYDVNKKMDSEDTALCVGAVVTNMFHWWVDQNRENIEKFKEQDPENNGVMKFEGVKEATVDELNEFYRDNRDNYADQSRFFDLIKKHFPNKALNPEELFELYFNGFYYGSSHRYIEDNEPAQNNLFSKVLENNKLLNPERSYGIDGFSNNVINALKSHKVLGLVYTTPLRYGHIISMWGADIDQDGKVKAIYVTDSDDREITFNDNSKRRIGMIRYDVLVDDNGNIRFTGKGKTHKEEGAIYAGLYSLSLGDEVWEDYFKKYPEVQENL

SEQ ID NO: 576 - protein, 557 aa, synthetic construct
DKTHTCPPCPAPEAAGAPSVFLFPPKPKDTLMISRTPEVTCVVVDVSHEDPEVKFNWYVDGVEVHNAKTKPREEQQNSTYRVVSVLTVLHQDWLNGKEYKCKVSNKALKAPIEKTISKAKGQPREPQVYTLPPSRDELTKNQVSLTCLVKGFYPSDIAVEWESNGQPENNYKTTPPVLDSDGSFFLYSKLTVDKSRWQQGNVFSCSVMHEALHNHYTQKSLSLSPGGGGSGGGGSGGGGSTALGRRKAEDRIKETLWADGVKIDEKDFEHIKSSHEDYFAVEYGKGSGYYDVNKKMDSEDTALCVGAVVTNMFHWWVDQNRENIEKFKKQDPENNGVMKFEGVKEATVDELNEFYRDNRDNYADQSRFFDLIKKHFPNKALNPEELFELYFNGFYYGSSHRYIEDNEPAQNNLFSKVLENNKLLNPERSYGIDGFSNNVKNALKSHKVLGLVYTTPLRYGHIISMWGADIDQDGKVKAIYVTDSDDREITFNDNSKRRIGMIRYDVLVDDNGNIRFTGKGATHKEEGAIYAGLYSLSRGDEVWEDYFKKYPEVQENL

SEQ ID NO: 577 - protein, 557 aa, synthetic construct
DKTHTCPPCPAPEAAGAPSVFLFPPKPKDTLMISRTPEVTCVVVDVSHEDPEVKFNWYVDGVEVHNAKTKPREEQQNSTYRVVSVLTVLHQDWLNGKEYKCKVSNKALKAPIEKTISKAKGQPREPQVYTLPPSRDELTKNQVSLTCLVKGFYPSDIAVEWESNGQPENNYKTTPPVLDSDGSFFLYSKLTVDKSRWQQGNVFSCSVMHEALHNHYTQKSLSLSPGGGGSGGGGSGGGGSTALGRRKAEDRIKETLWADGVKIDEKDFEHIDSSHEDYFAVEYGKGSGYYDVNKKMDSEDTALCVGAVVTNMFHWWVDQNRENIEKFKEQDPENNGVMKFEGVKEATVDELNEFYRDNRDNYADQSRFFDLIKKHFPNKALNPEELFELYFNGFYYGSSHRYIEDNEPAQNNLFSKVLENNKLLNPERSYGIDGFSNNVKNALKSHKVLGLVYTTPLRYGHIISMWGADIDQDGKVKAIYVTDSDDREITFNDNSKRRIGMIRYDVLVDDNGNIRFTGKGATHKEEGAIYAGLYSLSRGDEVWEDYFKKYPEVQENL

SEQ ID NO: 578 - protein, 557 aa, synthetic construct
DKTHTCPPCPAPEAAGAPSVFLFPPKPKDTLMISRTPEVTCVVVDVSHEDPEVKFNWYVDGVEVHNAKTKPREEQQNSTYRVVSVLTVLHQDWLNGKEYKCKVSNKALKAPIEKTISKAKGQPREPQVYTLPPSRDELTKNQVSLTCLVKGFYPSDIAVEWESNGQPENNYKTTPPVLDSDGSFFLYSKLTVDKSRWQQGNVFSCSVMHEALHNHYTQKSLSLSPGGGGSGGGGSGGGGSTALGRRKAEDRIKETLWADGVKIDEKDFEHIKSSHEDYFAVEYGKGSGYYDVNKKMDSEDTALCVGAVVTNMFHWWVEQNRENIEKFKKQDPENNGVMKFEGVKEATVDELNEFYRDNRDNYADQSRFFDLIKKHFPNKALNPEELFELYFNGFYYGSSHRYIEDNEPAQNNLFSKVLDNNKLLNPERSYGIDGFSNNVKNALKSHKVLGLVYTTPLRYGHIISMWGADIDQDGKVKAIYVTDSDDREITFNDNSKRRIGMIRYDVLVDDNGNIRFTGKGATHKEEGAIYAGLYSLSRGDEVWEDYFKKYPEVQENL

SEQ ID NO: 579 - protein, 557 aa, synthetic construct
DKTHTCPPCPAPEAAGAPSVFLFPPKPKDTLMISRTPEVTCVVVDVSHEDPEVKFNWYVDGVEVHNAKTKPREEQQNSTYRVVSVLTVLHQDWLNGKEYKCKVSNKALKAPIEKTISKAKGQPREPQVYTLPPSRDELTKNQVSLTCLVKGFYPSDIAVEWESNGQPENNYKTTPPVLDSDGSFFLYSKLTVDKSRWQQGNVFSCSVMHEALHNHYTQKSLSLSPGGGGSGGGGSGGGGSTALGRRKAEDRIKETLWADGVKIDEKDFEHIKSSHEDYFAVEYGKGSGYYDVNKKMDSEDTALCVGAVVTNMFHWWVEQNRENIEKFKKQDPENNGVMKFEGVKEATVDELNEFYRDNRDNYADQSRFFDLIKKHFPNKALNPEELFELYFNGFYYGSSHRYIEDNEPAQNNLFSKVLDNNKLLNPERSYGIDGFSNNVKNALKSHKVLGLVYTTPLRYGHIISMWGADIDQDGKVKAIYVTDSDDREITFNDNSKRRIGMIRYDVLVDDNGNIRFTGKGKTHKEEGAIYAGLYSLSLGDEVWEDYFKKYPEVQENL

SEQ ID NO: 580 - protein, 557 aa, synthetic construct
DKTHTCPPCPAPEAAGAPSVFLFPPKPKDTLMISRTPEVTCVVVDVSHEDPEVKFNWYVDGVEVHNAKTKPREEQQNSTYRVVSVLTVLHQDWLNGKEYKCKVSNKALKAPIEKTISKAKGQPREPQVYTLPPSRDELTKNQVSLTCLVKGFYPSDIAVEWESNGQPENNYKTTPPVLDSDGSFFLYSKLTVDKSRWQQGNVFSCSVMHEALHNHYTQKSLSLSPGGGGSGGGGSGGGGSTALGRRKAEDRIKETLWADGVKIDEKDFEHIDSSHEDYFAVEYGKGSGYYDVNKKMDSEDTALCVGAVVTNMFHWWVEQNRENIEKFKEQDPENNGVMKFEGVKEATVDELNEFYRDNRDNYADQSRFFDLIKKHFPNKALNPEELFELYFNGFYYGSSHRYIEDNEPAQNNLFSKVLDNNKLLNPERSYGIDGFSNNVKNALKSHKVLGLVYTTPLRYGHIISMWGADIDQDGKVKAIYVTDSDDREITFNDNSKRRIGMIRYDVLVDDNGNIRFTGKGATHKEEGAIYAGLYSLSRGDEVWEDYFKKYPEVQENL

SEQ ID NO: 581 - protein, 557 aa, synthetic construct
DKTHTCPPCPAPEAAGAPSVFLFPPKPKDTLMISRTPEVTCVVVDVSHEDPEVKFNWYVDGVEVHNAKTKPREEQQNSTYRVVSVLTVLHQDWLNGKEYKCKVSNKALKAPIEKTISKAKGQPREPQVYTLPPSRDELTKNQVSLTCLVKGFYPSDIAVEWESNGQPENNYKTTPPVLDSDGSFFLYSKLTVDKSRWQQGNVFSCSVMHEALHNHYTQKSLSLSPGGGGSGGGGSGGGGSTALGRRKAEDRIKETLWADGVKIDEKDFEHIDSSHEDYFAVEYGKGSGYYDVNKKMDSEDTALCVGAVVTNMFHWWVDQNRENIEKFKEQDPENNGVMKFEGVKEATVDELNEFYRDNRDNYADQSRFFDLIKKHFPNKALNPEELFELYFNGFYYGSSHRYIEDNEPAQNNLFSKVLENNKLLNPERSYGIDGFSNNVKNALKSHKVLGLVYTTPLRYGHIISMWGADIDQDGKVKAIYVTDSDDREITFNDNSKRRIGMIRYDVLVDDNGNIRFTGKGKTHKEEGAIYAGLYSLSLGDEVWEDYFKKYPEVQENL

SEQ ID NO: 582 - protein, 557 aa, synthetic construct
DKTHTCPPCPAPEAAGAPSVFLFPPKPKDTLMISRTPEVTCVVVDVSHEDPEVKFNWYVDGVEVHNAKTKPREEQQNSTYRVVSVLTVLHQDWLNGKEYKCKVSNKALKAPIEKTISKAKGQPREPQVYTLPPSRDELTKNQVSLTCLVKGFYPSDIAVEWESNGQPENNYKTTPPVLDSDGSFFLYSKLTVDKSRWQQGNVFSCSVMHEALHNHYTQKSLSLSPGGGGSGGGGSGGGGSTALGRRKAEDRIKETLWADGVKIDEKDFEHIDSSHEDYFAVEYGKGSGYYDVNKKMDSEDTALCVGAVVTNMFHWWVEQNRENIEKFKEQDPENNGVMKFEGVKEATVDELNEFYRDNRDNYADQSRFFDLIKKHFPNKALNPEELFELYFNGFYYGSSHRYIEDNEPAQNNLFSKVLDNNKLLNPERSYGIDGFSNNVKNALKSHKVLGLVYTTPLRYGHIISMWGADIDQDGKVKAIYVTDPDDREITFNDNSKRRIGMIRYDVLVDDNGNIRFTGKGATHKEEGAIYAGLYSLSRGDEVWEDYFKKYPEVQENL

SEQ ID NO: 583 - protein, 557 aa, synthetic construct
DKTHTCPPCPAPEAAGAPSVFLFPPKPKDTLMISRTPEVTCVVVDVSHEDPEVKFNWYVDGVEVHNAKTKPREEQQNSTYRVVSVLTVLHQDWLNGKEYKCKVSNKALKAPIEKTISKAKGQPREPQVYTLPPSRDELTKNQVSLTCLVKGFYPSDIAVEWESNGQPENNYKTTPPVLDSDGSFFLYSKLTVDKSRWQQGNVFSCSVMHEALHNHYTQKSLSLSPGGGGSGGGGSGGGGSTALGRRKAEDRIKETLWADGVKIDEKDFEHIDSSHEDYFAVEYGKGSGYYDVNKKMDSEDTALCVGAVVTNMFHWWVDQNRENIEKFKEQDPENNGVMKFEGVKEATVDELNEFYRDNRDNYADQSRFFDLIKKHFPNKALNPEELFELYFNGFYYGSSHRYIEDNEPAQNNLFSKVLENNKLLNPERSYGIDGFSNNVKNALKSHKVLGLVYTTPLRYGHIISMWGADIDQDGKVKAIYVTDPDDREITFNDNSKRRIGMIRYDVLVDDNGNIRFTGKGKTHKEEGAIYAGLYSLSLGDEVWEDYFKKYPEVQENL

SEQ ID NO: 584 - protein, 557 aa, synthetic construct
DKTHTCPPCPAPEAAGAPSVFLFPPKPKDTLMISRTPEVTCVVVDVSHEDPEVKFNWYVDGVEVHNAKTKPREEQQNSTYRVVSVLTVLHQDWLNGKEYKCKVSNKALKAPIEKTISKAKGQPREPQVYTLPPSRDELTKNQVSLTCLVKGFYPSDIAVEWESNGQPENNYKTTPPVLDSDGSFFLYSKLTVDKSRWQQGNVFSCSVMHEALHNHYTQKSLSLSPGGGGSGGGGSGGGGSTALGRRKAEDRIKETLWADGVKIDEKDFEHIDSSHEDYFAVEYGKGSGYYDVNKKMDSEDTALCVGAVVTNMFHWWVEQNRENIEKFKEQDPENNGVMKFEGVKEATVDELNEFYRDNRDNYADQSRFFDLIKKHFPNKALNPEELFELYFNGFYYGSSHRYIEDNEPAQNNLFSKVLDNNKLLNPERSYGIDGFSNNVKNALKSHKVLGLVYTTPLRYGHIISMWGADIDQDGKVKAIYVTDPDDREITFNDNSKRRIGMIRYDVLVDDNGNIRFTGKGKTHKEEGAIYAGLYSLSLGDEVWEDYFKKYPEVQENL

SEQ ID NO: 585 - protein, 557 aa, synthetic construct
DKTHTCPPCPAPEAAGAPSVFLFPPKPKDTLMISRTPEVTCVVVDVSHEDPEVKFNWYVDGVEVHNAKTKPREEQQNSTYRVVSVLTVLHQDWLNGKEYKCKVSNKALKAPIEKTISKAKGQPREPQVYTLPPSRDELTKNQVSLTCLVKGFYPSDIAVEWESNGQPENNYKTTPPVLDSDGSFFLYSKLTVDKSRWQQGNVFSCSVMHEALHNHYTQKSLSLSPGGGGSGGGGSGGGGSTALGRRKAEDRIKETLWADGVKIDEKDFEHIDSSHEDYFAVEYGKGSGYYDVNKKMDSEDTALCVGAVVTNMFHWWVDQNRENIEKFKEQDPENNGVMKFEGVKEATVDELNEFYRDNRDNYADQSRFFDLIKKHFPNKALNPEELFELYFNGFYYGSSHRYIEDNEPAQNNLFSKVLENNKLLNPERSYGIDGFSNNVKNALKSHKVLGLVYTTPLRYGHIISMWGADIDQDGKVKAIYVTDSDDREITFNDNSKRRIGMIRYDVLVDDEGNIRFTGKGATHKEEGAIYAGLYSLSRGDEVWEDYFKKYPEVQENL

SEQ ID NO: 586 - protein, 557 aa, synthetic construct
DKTHTCPPCPAPEAAGAPSVFLFPPKPKDTLMISRTPEVTCVVVDVSHEDPEVKFNWYVDGVEVHNAKTKPREEQQNSTYRVVSVLTVLHQDWLNGKEYKCKVSNKALKAPIEKTISKAKGQPREPQVYTLPPSRDELTKNQVSLTCLVKGFYPSDIAVEWESNGQPENNYKTTPPVLDSDGSFFLYSKLTVDKSRWQQGNVFSCSVMHEALHNHYTQKSLSLSPGGGGSGGGGSGGGGSTALGRRKAEDRIKETLWADGVKIDEKDFEHIDSSHEDYFAVEYGKGSGYYDVNKKMDSEDTALCVGAVVTNMFHWWVEQNRENIEKFKEQDPENNGVMKFEGVKEATVDELNEFYRDNRDNYADQSRFFDLIKKHFPNKALNPEELFELYFNGFYYGSSHRYIEDNEPAQNNLFSKVLDNNKLLNPERSYGIDGFSNNVKNALKSHKVLGLVYTTPLRYGHIISMWGADIDQDGKVKAIYVTDSDDREITFNDNSKRRIGMIRYDVLVDDEGNIRFTGKGATHKEEGAIYAGLYSLSRGDEVWEDYFKKYPEVQENL

SEQ ID NO: 587 - protein, 557 aa, synthetic construct
DKTHTCPPCPAPEAAGAPSVFLFPPKPKDTLMISRTPEVTCVVVDVSHEDPEVKFNWYVDGVEVHNAKTKPREEQQNSTYRVVSVLTVLHQDWLNGKEYKCKVSNKALKAPIEKTISKAKGQPREPQVYTLPPSRDELTKNQVSLTCLVKGFYPSDIAVEWESNGQPENNYKTTPPVLDSDGSFFLYSKLTVDKSRWQQGNVFSCSVMHEALHNHYTQKSLSLSPGGGGSGGGGSGGGGSTALGRRKAEDRIKETLWADGVKIDEKDFEHIDSSHEDYFAVEYGKGSGYYDVNKKMDSEDTALCVGAVVTNMFHWWVEQNRENIEKFKEQDPENNGVMKFEGVKEATVDELNEFYRDNRDNYADQSRFFDLIKKHFPNKALNPEELFELYFNGFYYGSSHRYIEDNEPAQNNLFSKVLDNNKLLNPERSYGIDGFSNNVKNALKSHKVLGLVYTTPLRYGHIISMWGADIDQDGKVKAIYVTDSDDREITFNDNSKRRIGMIRYDVLVDDEGNIRFTGKGKTHKEEGAIYAGLYSLSLGDEVWEDYFKKYPEVQENL

SEQ ID NO: 588 - protein, 557 aa, synthetic construct
DKTHTCPPCPAPEAAGAPSVFLFPPKPKDTLMISRTPEVTCVVVDVSHEDPEVKFNWYVDGVEVHNAKTKPREEQQNSTYRVVSVLTVLHQDWLNGKEYKCKVSNKALKAPIEKTISKAKGQPREPQVYTLPPSRDELTKNQVSLTCLVKGFYPSDIAVEWESNGQPENNYKTTPPVLDSDGSFFLYSKLTVDKSRWQQGNVFSCSVMHEALHNHYTQKSLSLSPGGGGSGGGGSGGGGSTALGRRKAEDRIKETLWADGVKIDEKDFEHIDSSHEDYFAVEYGKGSGYYDVNKKMDSEDTALCVGAVVTNMFHWWVEQNRENIEKFKEQDPENNGVMKFEGVKEATVDELNEFYRDNRDNYADQSRFFDLIKKHFPNKALNPEELFELYFNGFYYGSSHRYIEDNEPAQNNLFSKVLDNNKLLNPERSYGIDGFSNNVKNALKSHKVLGLVYTTPLRYGHIISMWGADIDQDGKVKAIYVTDPDDREITFNDNSKRRIGMIRYDVLVDDEGNIRFTGKGATHKEEGAIYAGLYSLSRGDEVWEDYFKKYPEVQENL

SEQ ID NO: 589 - protein, 557 aa, synthetic construct
DKTHTCPPCPAPEAAGAPSVFLFPPKPKDTLMISRTPEVTCVVVDVSHEDPEVKFNWYVDGVEVHNAKTKPREEQQNSTYRVVSVLTVLHQDWLNGKEYKCKVSNKALKAPIEKTISKAKGQPREPQVYTLPPSRDELTKNQVSLTCLVKGFYPSDIAVEWESNGQPENNYKTTPPVLDSDGSFFLYSKLTVDKSRWQQGNVFSCSVMHEALHNHYTQKSLSLSPGGGGSGGGGSGGGGSTALGRRKAEDRIKETLWADGVKIDEKDFEHIDSSHEDYFAVEYGKGSGYYDVNKKMDSEDTALCVGAVVTNMFHWWVDQNRENIEKFKEQDPENNGVMKFEGVKEATVDELNEFYRDNRDNYADQSRFFDLIKKHFPNKALNPEELFELYFNGFYYGSSHRYIEDNEPAQNNLFSKVLENNKLLNPERSYGIDGFSNNVKNALKSHKVLGLVYTTPLRYGHIISMWGADIDQDGKVKAIYVTDPDDREITFNDNSKRRIGMIRYDVLVDDEGNIRFTGKGKTHKEEGAIYAGLYSLSLGDEVWEDYFKKYPEVQENL

SEQ ID NO: 590 - protein, 557 aa, synthetic construct
DKTHTCPPCPAPEAAGAPSVFLFPPKPKDTLMISRTPEVTCVVVDVSHEDPEVKFNWYVDGVEVHNAKTKPREEQQNSTYRVVSVLTVLHQDWLNGKEYKCKVSNKALKAPIEKTISKAKGQPREPQVYTLPPSRDELTKNQVSLTCLVKGFYPSDIAVEWESNGQPENNYKTTPPVLDSDGSFFLYSKLTVDKSRWQQGNVFSCSVMHEALHNHYTQKSLSLSPGGGGSGGGGSGGGGSTALGRRKAEDRIKETLWADGVKIDEKDFEHIDSSHEDYFAVEYGKGSGYYDVNKKMDSEDTALCVGAVVTNMFHWWVEQNRENIEKFKEQDPENNGVMKFEGVKEATVDELNEFYRDNRDNYADQSRFFDLIKKHFPNKALNPEELFELYFNGFYYGSSHRYIEDNEPAQNNLFSKVLDNNKLLNPERSYGIDGFSNNVKNALKSHKVLGLVYTTPLRYGHIISMWGADIDQDGKVKAIYVTDPDDREITFNDNSKRRIGMIRYDVLVDDEGNIRFTGKGKTHKEEGAIYAGLYSLSLGDEVWEDYFKKYPEVQENL

SEQ ID NO: 591 - protein, 557 aa, synthetic construct
DKTHTCPPCPAPEAAGAPSVFLFPPKPKDTLMISRTPEVTCVVVDVSHEDPEVKFNWYVDGVEVHNAKTKPREEQQNSTYRVVSVLTVLHQDWLNGKEYKCKVSNKALKAPIEKTISKAKGQPREPQVYTLPPSRDELTKNQVSLTCLVKGFYPSDIAVEWESNGQPENNYKTTPPVLDSDGSFFLYSKLTVDKSRWQQGNVFSCSVMHEALHNHYTQKSLSLSPGGGGSGGGGSGGGGSTALGRRKAEDRIKETLWADGVKIDEKDFEHIKSSHEDYFAVEYGKGSGYYDVNKKMDSEDTALCVGAVVTNMFHWWVDQNRENIEKFKKQDPENNGVMKFEGVKEATVDELNEFYRDNRDNYADQSRFFDLIKKHFPNKALNPEELFELYFNGFYYGSSHRYIEDNEPAQNNLFSKVLENNKLLNPERSYGIDGFSNNVINALKSHKVLGLVYTTPLRSRHIISMWGADIDQDGKVKAIYVTDSDDREITFNDNSKRRIGMIRYDVLVDDNGNIRFTGKGATHKEEGAIYAGLYSLSRGDEVWEDYFKKYPEVQENL

SEQ ID NO: 592 - protein, 557 aa, synthetic construct
DKTHTCPPCPAPEAAGAPSVFLFPPKPKDTLMISRTPEVTCVVVDVSHEDPEVKFNWYVDGVEVHNAKTKPREEQQNSTYRVVSVLTVLHQDWLNGKEYKCKVSNKALKAPIEKTISKAKGQPREPQVYTLPPSRDELTKNQVSLTCLVKGFYPSDIAVEWESNGQPENNYKTTPPVLDSDGSFFLYSKLTVDKSRWQQGNVFSCSVMHEALHNHYTQKSLSLSPGGGGSGGGGSGGGGSTALGRRKAEDRIKETLWADGVKIDEKDFEHIDSSHEDYFAVEYGKGSGYYDVNKKMDSEDTALCVGAVVTNMFHWWVDQNRENIEKFKEQDPENNGVMKFEGVKEATVDELNEFYRDNRDNYADQSRFFDLIKKHFPNKALNPEELFELYFNGFYYGSSHRYIEDNEPAQNNLFSKVLENNKLLNPERSYGIDGFSNNVINALKSHKVLGLVYTTPLRSRHIISMWGADIDQDGKVKAIYVTDSDDREITFNDNSKRRIGMIRYDVLVDDNGNIRFTGKGATHKEEGAIYAGLYSLSRGDEVWEDYFKKYPEVQENL

SEQ ID NO: 593 - protein, 557 aa, synthetic construct
DKTHTCPPCPAPEAAGAPSVFLFPPKPKDTLMISRTPEVTCVVVDVSHEDPEVKFNWYVDGVEVHNAKTKPREEQQNSTYRVVSVLTVLHQDWLNGKEYKCKVSNKALKAPIEKTISKAKGQPREPQVYTLPPSRDELTKNQVSLTCLVKGFYPSDIAVEWESNGQPENNYKTTPPVLDSDGSFFLYSKLTVDKSRWQQGNVFSCSVMHEALHNHYTQKSLSLSPGGGGSGGGGSGGGGSTALGRRKAEDRIKETLWADGVKIDEKDFEHIKSSHEDYFAVEYGKGSGYYDVNKKMDSEDTALCVGAVVTNMFHWWVEQNRENIEKFKKQDPENNGVMKFEGVKEATVDELNEFYRDNRDNYADQSRFFDLIKKHFPNKALNPEELFELYFNGFYYGSSHRYIEDNEPAQNNLFSKVLDNNKLLNPERSYGIDGFSNNVINALKSHKVLGLVYTTPLRSRHIISMWGADIDQDGKVKAIYVTDSDDREITFNDNSKRRIGMIRYDVLVDDNGNIRFTGKGATHKEEGAIYAGLYSLSRGDEVWEDYFKKYPEVQENL

SEQ ID NO: 594 - protein, 557 aa, synthetic construct
DKTHTCPPCPAPEAAGAPSVFLFPPKPKDTLMISRTPEVTCVVVDVSHEDPEVKFNWYVDGVEVHNAKTKPREEQQNSTYRVVSVLTVLHQDWLNGKEYKCKVSNKALKAPIEKTISKAKGQPREPQVYTLPPSRDELTKNQVSLTCLVKGFYPSDIAVEWESNGQPENNYKTTPPVLDSDGSFFLYSKLTVDKSRWQQGNVFSCSVMHEALHNHYTQKSLSLSPGGGGSGGGGSGGGGSTALGRRKAEDRIKETLWADGVKIDEKDFEHIKSSHEDYFAVEYGKGSGYYDVNKKMDSEDTALCVGAVVTNMFHWWVDQNRENIEKFKKQDPENNGVMKFEGVKEATVDELNEFYRDNRDNYADQSRFFDLIKKHFPNKALNPEELFELYFNGFYYGSSHRYIEDNEPAQNNLFSKVLENNKLLNPERSYGIDGFSNNVINALKSHKVLGLVYTTPLRSRHIISMWGADIDQDGKVKAIYVTDSDDREITFNDNSKRRIGMIRYDVLVDDNGNIRFTGKGKTHKEEGAIYAGLYSLSLGDEVWEDYFKKYPEVQENL

SEQ ID NO: 595 - protein, 557 aa, synthetic construct
DKTHTCPPCPAPEAAGAPSVFLFPPKPKDTLMISRTPEVTCVVVDVSHEDPEVKFNWYVDGVEVHNAKTKPREEQQNSTYRVVSVLTVLHQDWLNGKEYKCKVSNKALKAPIEKTISKAKGQPREPQVYTLPPSRDELTKNQVSLTCLVKGFYPSDIAVEWESNGQPENNYKTTPPVLDSDGSFFLYSKLTVDKSRWQQGNVFSCSVMHEALHNHYTQKSLSLSPGGGGSGGGGSGGGGSTALGRRKAEDRIKETLWADGVKIDEKDFEHIKSSHEDYFAVEYGKGSGYYDVNKKMDSEDTALCVGAVVTNMFHWWVEQNRENIEKFKKQDPENNGVMKFEGVKEATVDELNEFYRDNRDNYADQSRFFDLIKKHFPNKALNPEELFELYFNGFYYGSSHRYIEDNEPAQNNLFSKVLDNNKLLNPERSYGIDGFSNNVINALKSHKVLGLVYTTPLRSRHIISMWGADIDQDGKVKAIYVTDSDDREITFNDNSKRRIGMIRYDVLVDDNGNIRFTGKGKTHKEEGAIYAGLYSLSLGDEVWEDYFKKYPEVQENL

SEQ ID NO: 596 - protein, 557 aa, synthetic construct
DKTHTCPPCPAPEAAGAPSVFLFPPKPKDTLMISRTPEVTCVVVDVSHEDPEVKFNWYVDGVEVHNAKTKPREEQQNSTYRVVSVLTVLHQDWLNGKEYKCKVSNKALKAPIEKTISKAKGQPREPQVYTLPPSRDELTKNQVSLTCLVKGFYPSDIAVEWESNGQPENNYKTTPPVLDSDGSFFLYSKLTVDKSRWQQGNVFSCSVMHEALHNHYTQKSLSLSPGGGGSGGGGSGGGGSTALGRRKAEDRIKETLWADGVKIDEKDFEHIDSSHEDYFAVEYGKGSGYYDVNKKMDSEDTALCVGAVVTNMFHWWVEQNRENIEKFKEQDPENNGVMKFEGVKEATVDELNEFYRDNRDNYADQSRFFDLIKKHFPNKALNPEELFELYFNGFYYGSSHRYIEDNEPAQNNLFSKVLDNNKLLNPERSYGIDGFSNNVINALKSHKVLGLVYTTPLRSRHIISMWGADIDQDGKVKAIYVTDSDDREITFNDNSKRRIGMIRYDVLVDDNGNIRFTGKGATHKEEGAIYAGLYSLSRGDEVWEDYFKKYPEVQENL

SEQ ID NO: 597 - protein, 557 aa, synthetic construct
DKTHTCPPCPAPEAAGAPSVFLFPPKPKDTLMISRTPEVTCVVVDVSHEDPEVKFNWYVDGVEVHNAKTKPREEQQNSTYRVVSVLTVLHQDWLNGKEYKCKVSNKALKAPIEKTISKAKGQPREPQVYTLPPSRDELTKNQVSLTCLVKGFYPSDIAVEWESNGQPENNYKTTPPVLDSDGSFFLYSKLTVDKSRWQQGNVFSCSVMHEALHNHYTQKSLSLSPGGGGSGGGGSGGGGSTALGRRKAEDRIKETLWADGVKIDEKDFEHIDSSHEDYFAVEYGKGSGYYDVNKKMDSEDTALCVGAVVTNMFHWWVDQNRENIEKFKEQDPENNGVMKFEGVKEATVDELNEFYRDNRDNYADQSRFFDLIKKHFPNKALNPEELFELYFNGFYYGSSHRYIEDNEPAQNNLFSKVLENNKLLNPERSYGIDGFSNNVINALKSHKVLGLVYTTPLRSRHIISMWGADIDQDGKVKAIYVTDSDDREITFNDNSKRRIGMIRYDVLVDDNGNIRFTGKGKTHKEEGAIYAGLYSLSLGDEVWEDYFKKYPEVQENL

SEQ ID NO: 598 - protein, 557 aa, synthetic construct
DKTHTCPPCPAPEAAGAPSVFLFPPKPKDTLMISRTPEVTCVVVDVSHEDPEVKFNWYVDGVEVHNAKTKPREEQQNSTYRVVSVLTVLHQDWLNGKEYKCKVSNKALKAPIEKTISKAKGQPREPQVYTLPPSRDELTKNQVSLTCLVKGFYPSDIAVEWESNGQPENNYKTTPPVLDSDGSFFLYSKLTVDKSRWQQGNVFSCSVMHEALHNHYTQKSLSLSPGGGGSGGGGSGGGGSTALGRRKAEDRIKETLWADGVKIDEKDFEHIKSSHEDYFAVEYGKGSGYYDVNKKMDSEDTALCVGAVVTNMFHWWVDQNRENIEKFKKQDPENNGVMKFEGVKEATVDELNEFYRDNRDNYADQSRFFDLIKKHFPNKALNPEELFELYFNGFYYGSSHRYIEDNEPAQNNLFSKVLENNKLLNPERSYGIDGFSNNVKNALKSHKVLGLVYTTPLRSRHIISMWGADIDQDGKVKAIYVTDSDDREITFNDNSKRRIGMIRYDVLVDDNGNIRFTGKGATHKEEGAIYAGLYSLSRGDEVWEDYFKKYPEVQENL

SEQ ID NO: 599 - protein, 557 aa, synthetic construct
DKTHTCPPCPAPEAAGAPSVFLFPPKPKDTLMISRTPEVTCVVVDVSHEDPEVKFNWYVDGVEVHNAKTKPREEQQNSTYRVVSVLTVLHQDWLNGKEYKCKVSNKALKAPIEKTISKAKGQPREPQVYTLPPSRDELTKNQVSLTCLVKGFYPSDIAVEWESNGQPENNYKTTPPVLDSDGSFFLYSKLTVDKSRWQQGNVFSCSVMHEALHNHYTQKSLSLSPGGGGSGGGGSGGGGSTALGRRKAEDRIKETLWADGVKIDEKDFEHIDSSHEDYFAVEYGKGSGYYDVNKKMDSEDTALCVGAVVTNMFHWWVDQNRENIEKFKEQDPENNGVMKFEGVKEATVDELNEFYRDNRDNYADQSRFFDLIKKHFPNKALNPEELFELYFNGFYYGSSHRYIEDNEPAQNNLFSKVLENNKLLNPERSYGIDGFSNNVKNALKSHKVLGLVYTTPLRSRHIISMWGADIDQDGKVKAIYVTDSDDREITFNDNSKRRIGMIRYDVLVDDNGNIRFTGKGATHKEEGAIYAGLYSLSRGDEVWEDYFKKYPEVQENL

SEQ ID NO: 600 - protein, 557 aa, synthetic construct
DKTHTCPPCPAPEAAGAPSVFLFPPKPKDTLMISRTPEVTCVVVDVSHEDPEVKFNWYVDGVEVHNAKTKPREEQQNSTYRVVSVLTVLHQDWLNGKEYKCKVSNKALKAPIEKTISKAKGQPREPQVYTLPPSRDELTKNQVSLTCLVKGFYPSDIAVEWESNGQPENNYKTTPPVLDSDGSFFLYSKLTVDKSRWQQGNVFSCSVMHEALHNHYTQKSLSLSPGGGGSGGGGSGGGGSTALGRRKAEDRIKETLWADGVKIDEKDFEHIKSSHEDYFAVEYGKGSGYYDVNKKMDSEDTALCVGAVVTNMFHWWVEQNRENIEKFKKQDPENNGVMKFEGVKEATVDELNEFYRDNRDNYADQSRFFDLIKKHFPNKALNPEELFELYFNGFYYGSSHRYIEDNEPAQNNLFSKVLDNNKLLNPERSYGIDGFSNNVKNALKSHKVLGLVYTTPLRSRHIISMWGADIDQDGKVKAIYVTDSDDREITFNDNSKRRIGMIRYDVLVDDNGNIRFTGKGATHKEEGAIYAGLYSLSRGDEVWEDYFKKYPEVQENL

SEQ ID NO: 601 - protein, 557 aa, synthetic construct
DKTHTCPPCPAPEAAGAPSVFLFPPKPKDTLMISRTPEVTCVVVDVSHEDPEVKFNWYVDGVEVHNAKTKPREEQQNSTYRVVSVLTVLHQDWLNGKEYKCKVSNKALKAPIEKTISKAKGQPREPQVYTLPPSRDELTKNQVSLTCLVKGFYPSDIAVEWESNGQPENNYKTTPPVLDSDGSFFLYSKLTVDKSRWQQGNVFSCSVMHEALHNHYTQKSLSLSPGGGGSGGGGSGGGGSTALGRRKAEDRIKETLWADGVKIDEKDFEHIKSSHEDYFAVEYGKGSGYYDVNKKMDSEDTALCVGAVVTNMFHWWVDQNRENIEKFKKQDPENNGVMKFEGVKEATVDELNEFYRDNRDNYADQSRFFDLIKKHFPNKALNPEELFELYFNGFYYGSSHRYIEDNEPAQNNLFSKVLENNKLLNPERSYGIDGFSNNVKNALKSHKVLGLVYTTPLRSRHIISMWGADIDQDGKVKAIYVTDSDDREITFNDNSKRRIGMIRYDVLVDDNGNIRFTGKGKTHKEEGAIYAGLYSLSLGDEVWEDYFKKYPEVQENL

SEQ ID NO: 602 - protein, 557 aa, synthetic construct
DKTHTCPPCPAPEAAGAPSVFLFPPKPKDTLMISRTPEVTCVVVDVSHEDPEVKFNWYVDGVEVHNAKTKPREEQQNSTYRVVSVLTVLHQDWLNGKEYKCKVSNKALKAPIEKTISKAKGQPREPQVYTLPPSRDELTKNQVSLTCLVKGFYPSDIAVEWESNGQPENNYKTTPPVLDSDGSFFLYSKLTVDKSRWQQGNVFSCSVMHEALHNHYTQKSLSLSPGGGGSGGGGSGGGGSTALGRRKAEDRIKETLWADGVKIDEKDFEHIKSSHEDYFAVEYGKGSGYYDVNKKMDSEDTALCVGAVVTNMFHWWVEQNRENIEKFKKQDPENNGVMKFEGVKEATVDELNEFYRDNRDNYADQSRFFDLIKKHFPNKALNPEELFELYFNGFYYGSSHRYIEDNEPAQNNLFSKVLDNNKLLNPERSYGIDGFSNNVKNALKSHKVLGLVYTTPLRSRHIISMWGADIDQDGKVKAIYVTDSDDREITFNDNSKRRIGMIRYDVLVDDNGNIRFTGKGKTHKEEGAIYAGLYSLSLGDEVWEDYFKKYPEVQENL

SEQ ID NO: 603 - protein, 557 aa, synthetic construct
DKTHTCPPCPAPEAAGAPSVFLFPPKPKDTLMISRTPEVTCVVVDVSHEDPEVKFNWYVDGVEVHNAKTKPREEQQNSTYRVVSVLTVLHQDWLNGKEYKCKVSNKALKAPIEKTISKAKGQPREPQVYTLPPSRDELTKNQVSLTCLVKGFYPSDIAVEWESNGQPENNYKTTPPVLDSDGSFFLYSKLTVDKSRWQQGNVFSCSVMHEALHNHYTQKSLSLSPGGGGSGGGGSGGGGSTALGRRKAEDRIKETLWADGVKIDEKDFEHIDSSHEDYFAVEYGKGSGYYDVNKKMDSEDTALCVGAVVTNMFHWWVEQNRENIEKFKEQDPENNGVMKFEGVKEATVDELNEFYRDNRDNYADQSRFFDLIKKHFPNKALNPEELFELYFNGFYYGSSHRYIEDNEPAQNNLFSKVLDNNKLLNPERSYGIDGFSNNVKNALKSHKVLGLVYTTPLRSRHIISMWGADIDQDGKVKAIYVTDSDDREITFNDNSKRRIGMIRYDVLVDDNGNIRFTGKGATHKEEGAIYAGLYSLSRGDEVWEDYFKKYPEVQENL

SEQ ID NO: 604 - protein, 557 aa, synthetic construct
DKTHTCPPCPAPEAAGAPSVFLFPPKPKDTLMISRTPEVTCVVVDVSHEDPEVKFNWYVDGVEVHNAKTKPREEQQNSTYRVVSVLTVLHQDWLNGKEYKCKVSNKALKAPIEKTISKAKGQPREPQVYTLPPSRDELTKNQVSLTCLVKGFYPSDIAVEWESNGQPENNYKTTPPVLDSDGSFFLYSKLTVDKSRWQQGNVFSCSVMHEALHNHYTQKSLSLSPGGGGSGGGGSGGGGSTALGRRKAEDRIKETLWADGVKIDEKDFEHIDSSHEDYFAVEYGKGSGYYDVNKKMDSEDTALCVGAVVTNMFHWWVDQNRENIEKFKEQDPENNGVMKFEGVKEATVDELNEFYRDNRDNYADQSRFFDLIKKHFPNKALNPEELFELYFNGFYYGSSHRYIEDNEPAQNNLFSKVLENNKLLNPERSYGIDGFSNNVKNALKSHKVLGLVYTTPLRSRHIISMWGADIDQDGKVKAIYVTDSDDREITFNDNSKRRIGMIRYDVLVDDNGNIRFTGKGKTHKEEGAIYAGLYSLSLGDEVWEDYFKKYPEVQENL

SEQ ID NO: 605 - protein, 557 aa, synthetic construct
DKTHTCPPCPAPEAAGAPSVFLFPPKPKDTLMISRTPEVTCVVVDVSHEDPEVKFNWYVDGVEVHNAKTKPREEQQNSTYRVVSVLTVLHQDWLNGKEYKCKVSNKALKAPIEKTISKAKGQPREPQVYTLPPSRDELTKNQVSLTCLVKGFYPSDIAVEWESNGQPENNYKTTPPVLDSDGSFFLYSKLTVDKSRWQQGNVFSCSVMHEALHNHYTQKSLSLSPGGGGSGGGGSGGGGSTALGRRKAEDRIKETLWADGVKIDEKDFEHIDSSHEDYFAVEYGKGSGYYDVNKKMDSEDTALCVGAVVTNMFHWWVEQNRENIEKFKEQDPENNGVMKFEGVKEATVDELNEFYRDNRDNYADQSRFFDLIKKHFPNKALNPEELFELYFNGFYYGSSHRYIEDNEPAQNNLFSKVLDNNKLLNPERSYGIDGFSNNVKNALKSHKVLGLVYTTPLRSRHIISMWGADIDQDGKVKAIYVTDPDDREITFNDNSKRRIGMIRYDVLVDDNGNIRFTGKGKTHKEEGAIYAGLYSLSLGDEVWEDYFKKYPEVQENL

SEQ ID NO: 606 - protein, 557 aa, synthetic construct
DKTHTCPPCPAPEAAGAPSVFLFPPKPKDTLMISRTPEVTCVVVDVSHEDPEVKFNWYVDGVEVHNAKTKPREEQQNSTYRVVSVLTVLHQDWLNGKEYKCKVSNKALKAPIEKTISKAKGQPREPQVYTLPPSRDELTKNQVSLTCLVKGFYPSDIAVEWESNGQPENNYKTTPPVLDSDGSFFLYSKLTVDKSRWQQGNVFSCSVMHEALHNHYTQKSLSLSPGGGGSGGGGSGGGGSTALGRRKAEDRIKETLWADGVKIDEKDFEHIDSSHEDYFAVEYGKGSGYYDVNKKMDSEDTALCVGAVVTNMFHWWVDQNRENIEKFKEQDPENNGVMKFEGVKEATVDELNEFYRDNRDNYADQSRFFDLIKKHFPNKALNPEELFELYFNGFYYGSSHRYIEDNEPAQNNLFSKVLENNKLLNPERSYGIDGFSNNVKNALKSHKVLGLVYTTPLRSRHIISMWGADIDQDGKVKAIYVTDSDDREITFNDNSKRRIGMIRYDVLVDDEGNIRFTGKGATHKEEGAIYAGLYSLSRGDEVWEDYFKKYPEVQENL

SEQ ID NO: 607 - protein, 557 aa, synthetic construct
DKTHTCPPCPAPEAAGAPSVFLFPPKPKDTLMISRTPEVTCVVVDVSHEDPEVKFNWYVDGVEVHNAKTKPREEQQNSTYRVVSVLTVLHQDWLNGKEYKCKVSNKALKAPIEKTISKAKGQPREPQVYTLPPSRDELTKNQVSLTCLVKGFYPSDIAVEWESNGQPENNYKTTPPVLDSDGSFFLYSKLTVDKSRWQQGNVFSCSVMHEALHNHYTQKSLSLSPGGGGSGGGGSGGGGSTALGRRKAEDRIKETLWADGVKIDEKDFEHIDSSHEDYFAVEYGKGSGYYDVNKKMDSEDTALCVGAVVTNMFHWWVEQNRENIEKFKEQDPENNGVMKFEGVKEATVDELNEFYRDNRDNYADQSRFFDLIKKHFPNKALNPEELFELYFNGFYYGSSHRYIEDNEPAQNNLFSKVLDNNKLLNPERSYGIDGFSNNVKNALKSHKVLGLVYTTPLRSRHIISMWGADIDQDGKVKAIYVTDSDDREITFNDNSKRRIGMIRYDVLVDDEGNIRFTGKGATHKEEGAIYAGLYSLSRGDEVWEDYFKKYPEVQENL

SEQ ID NO: 608 - protein, 557 aa, synthetic construct
DKTHTCPPCPAPEAAGAPSVFLFPPKPKDTLMISRTPEVTCVVVDVSHEDPEVKFNWYVDGVEVHNAKTKPREEQQNSTYRVVSVLTVLHQDWLNGKEYKCKVSNKALKAPIEKTISKAKGQPREPQVYTLPPSRDELTKNQVSLTCLVKGFYPSDIAVEWESNGQPENNYKTTPPVLDSDGSFFLYSKLTVDKSRWQQGNVFSCSVMHEALHNHYTQKSLSLSPGGGGSGGGGSGGGGSTALGRRKAEDRIKETLWADGVKIDEKDFEHIDSSHEDYFAVEYGKGSGYYDVNKKMDSEDTALCVGAVVTNMFHWWVEQNRENIEKFKEQDPENNGVMKFEGVKEATVDELNEFYRDNRDNYADQSRFFDLIKKHFPNKALNPEELFELYFNGFYYGSSHRYIEDNEPAQNNLFSKVLDNNKLLNPERSYGIDGFSNNVKNALKSHKVLGLVYTTPLRSRHIISMWGADIDQDGKVKAIYVTDSDDREITFNDNSKRRIGMIRYDVLVDDEGNIRFTGKGKTHKEEGAIYAGLYSLSLGDEVWEDYFKKYPEVQENL

SEQ ID NO: 609 - protein, 557 aa, synthetic construct
DKTHTCPPCPAPEAAGAPSVFLFPPKPKDTLMISRTPEVTCVVVDVSHEDPEVKFNWYVDGVEVHNAKTKPREEQQNSTYRVVSVLTVLHQDWLNGKEYKCKVSNKALKAPIEKTISKAKGQPREPQVYTLPPSRDELTKNQVSLTCLVKGFYPSDIAVEWESNGQPENNYKTTPPVLDSDGSFFLYSKLTVDKSRWQQGNVFSCSVMHEALHNHYTQKSLSLSPGGGGSGGGGSGGGGSTALGRRKAEDRIKETLWADGVKIDEKDFEHIDSSHEDYFAVEYGKGSGYYDVNKKMDSEDTALCVGAVVTNMFHWWVEQNRENIEKFKEQDPENNGVMKFEGVKEATVDELNEFYRDNRDNYADQSRFFDLIKKHFPNKALNPEELFELYFNGFYYGSSHRYIEDNEPAQNNLFSKVLDNNKLLNPERSYGIDGFSNNVKNALKSHKVLGLVYTTPLRSRHIISMWGADIDQDGKVKAIYVTDPDDREITFNDNSKRRIGMIRYDVLVDDEGNIRFTGKGATHKEEGAIYAGLYSLSRGDEVWEDYFKKYPEVQENL

SEQ ID NO: 610 - protein, 557 aa, synthetic construct
DKTHTCPPCPAPEAAGAPSVFLFPPKPKDTLMISRTPEVTCVVVDVSHEDPEVKFNWYVDGVEVHNAKTKPREEQQNSTYRVVSVLTVLHQDWLNGKEYKCKVSNKALKAPIEKTISKAKGQPREPQVYTLPPSRDELTKNQVSLTCLVKGFYPSDIAVEWESNGQPENNYKTTPPVLDSDGSFFLYSKLTVDKSRWQQGNVFSCSVMHEALHNHYTQKSLSLSPGGGGSGGGGSGGGGSTALGRRKAEDRIKETLWADGVKIDEKDFEHIDSSHEDYFAVEYGKGSGYYDVNKKMDSEDTALCVGAVVTNMFHWWVEQNRENIEKFKEQDPENNGVMKFEGVKEATVDELNEFYRDNRDNYADQSRFFDLIKKHFPNKALNPEELFELYFNGFYYGSSHRYIEDNEPAQNNLFSKVLDNNKLLNPERSYGIDGFSNNVKNALKSHKVLGLVYTTPLRSRHIISMWGADIDQDGKVKAIYVTDPDDREITFNDNSKRRIGMIRYDVLVDDEGNIRFTGKGKTHKEEGAIYAGLYSLSLGDEVWEDYFKKYPEVQENL

SEQ ID NO: 611 - protein, 557 aa, synthetic construct
DKTHTCPPCPAPEAAGAPSVFLFPPKPKDTLMISRTPEVTCVVVDVSHEDPEVKFNWYVDGVEVHNAKTKPREEQQNSTYRVVSVLTVLHQDWLNGKEYKCKVSNKALKAPIEKTISKAKGQPREPQVYTLPPSRDELTKNQVSLTCLVKGFYPSDIAVEWESNGQPENNYKTTPPVLDSDGSFFLYSKLTVDKSRWQQGNVFSCSVMHEALHNHYTQKSLSLSPGGGGSGGGGSGGGGSTALGRRKAEDRIKETLWADGVKIDEKDFEHIDSSHEDYFAVEYGKGSGYYDVNKKMDSEDTALCVGAVVTNMFHWWVDQNRENIEKFKEQDPENNGVMKFEGVKEATVDELNEFYRDNRDNYADQSRFFDLIKKHFPNKALNPEELFELYFNGFYYGSSHRYIEDNEPAQNNLFSKVLENNKLLNPERSYGIDGFSNNVKNALKSHKVLGLVYTTPLRYRHIISMWGADIDQDGKVKAIYVTDSDDREITFNDNSKRRIGMIRYDVLVDDNGNIRFTGKGATHKEEGAIYAGLYSLSRGDEVWEDYFKKYPEVQENL

SEQ ID NO: 612 - protein, 557 aa, synthetic construct
DKTHTCPPCPAPEAAGAPSVFLFPPKPKDTLMISRTPEVTCVVVDVSHEDPEVKFNWYVDGVEVHNAKTKPREEQQNSTYRVVSVLTVLHQDWLNGKEYKCKVSNKALKAPIEKTISKAKGQPREPQVYTLPPSRDELTKNQVSLTCLVKGFYPSDIAVEWESNGQPENNYKTTPPVLDSDGSFFLYSKLTVDKSRWQQGNVFSCSVMHEALHNHYTQKSLSLSPGGGGSGGGGSGGGGSTALGRRKAEDRIKETLWADGVKIDEKDFEHIKSSHEDYFAVEYGKGSGYYDVNKKMDSEDTALCVGAVVTNMFHWWVEQNRENIEKFKKQDPENNGVMKFEGVKEATVDELNEFYRDNRDNYADQSRFFDLIKKHFPNKALNPEELFELYFNGFYYGSSHRYIEDNEPAQNNLFSKVLDNNKLLNPERSYGIDGFSNNVKNALKSHKVLGLVYTTPLRYRHIISMWGADIDQDGKVKAIYVTDSDDREITFNDNSKRRIGMIRYDVLVDDNGNIRFTGKGATHKEEGAIYAGLYSLSRGDEVWEDYFKKYPEVQENL

SEQ ID NO: 613 - protein, 557 aa, synthetic construct
DKTHTCPPCPAPEAAGAPSVFLFPPKPKDTLMISRTPEVTCVVVDVSHEDPEVKFNWYVDGVEVHNAKTKPREEQQNSTYRVVSVLTVLHQDWLNGKEYKCKVSNKALKAPIEKTISKAKGQPREPQVYTLPPSRDELTKNQVSLTCLVKGFYPSDIAVEWESNGQPENNYKTTPPVLDSDGSFFLYSKLTVDKSRWQQGNVFSCSVMHEALHNHYTQKSLSLSPGGGGSGGGGSGGGGSTALGRRKAEDRIKETLWADGVKIDEKDFEHIKSSHEDYFAVEYGKGSGYYDVNKKMDSEDTALCVGAVVTNMFHWWVDQNRENIEKFKKQDPENNGVMKFEGVKEATVDELNEFYRDNRDNYADQSRFFDLIKKHFPNKALNPEELFELYFNGFYYGSSHRYIEDNEPAQNNLFSKVLENNKLLNPERSYGIDGFSNNVKNALKSHKVLGLVYTTPLRYRHIISMWGADIDQDGKVKAIYVTDSDDREITFNDNSKRRIGMIRYDVLVDDNGNIRFTGKGKTHKEEGAIYAGLYSLSLGDEVWEDYFKKYPEVQENL

SEQ ID NO: 614 - protein, 557 aa, synthetic construct
DKTHTCPPCPAPEAAGAPSVFLFPPKPKDTLMISRTPEVTCVVVDVSHEDPEVKFNWYVDGVEVHNAKTKPREEQQNSTYRVVSVLTVLHQDWLNGKEYKCKVSNKALKAPIEKTISKAKGQPREPQVYTLPPSRDELTKNQVSLTCLVKGFYPSDIAVEWESNGQPENNYKTTPPVLDSDGSFFLYSKLTVDKSRWQQGNVFSCSVMHEALHNHYTQKSLSLSPGGGGSGGGGSGGGGSTALGRRKAEDRIKETLWADGVKIDEKDFEHIKSSHEDYFAVEYGKGSGYYDVNKKMDSEDTALCVGAVVTNMFHWWVEQNRENIEKFKKQDPENNGVMKFEGVKEATVDELNEFYRDNRDNYADQSRFFDLIKKHFPNKALNPEELFELYFNGFYYGSSHRYIEDNEPAQNNLFSKVLDNNKLLNPERSYGIDGFSNNVKNALKSHKVLGLVYTTPLRYRHIISMWGADIDQDGKVKAIYVTDSDDREITFNDNSKRRIGMIRYDVLVDDNGNIRFTGKGKTHKEEGAIYAGLYSLSLGDEVWEDYFKKYPEVQENL

SEQ ID NO: 615 - protein, 557 aa, synthetic construct
DKTHTCPPCPAPEAAGAPSVFLFPPKPKDTLMISRTPEVTCVVVDVSHEDPEVKFNWYVDGVEVHNAKTKPREEQQNSTYRVVSVLTVLHQDWLNGKEYKCKVSNKALKAPIEKTISKAKGQPREPQVYTLPPSRDELTKNQVSLTCLVKGFYPSDIAVEWESNGQPENNYKTTPPVLDSDGSFFLYSKLTVDKSRWQQGNVFSCSVMHEALHNHYTQKSLSLSPGGGGSGGGGSGGGGSTALGRRKAEDRIKETLWADGVKIDEKDFEHIDSSHEDYFAVEYGKGSGYYDVNKKMDSEDTALCVGAVVTNMFHWWVEQNRENIEKFKEQDPENNGVMKFEGVKEATVDELNEFYRDNRDNYADQSRFFDLIKKHFPNKALNPEELFELYFNGFYYGSSHRYIEDNEPAQNNLFSKVLDNNKLLNPERSYGIDGFSNNVKNALKSHKVLGLVYTTPLRYRHIISMWGADIDQDGKVKAIYVTDSDDREITFNDNSKRRIGMIRYDVLVDDNGNIRFTGKGATHKEEGAIYAGLYSLSRGDEVWEDYFKKYPEVQENL

SEQ ID NO: 616 - protein, 557 aa, synthetic construct
DKTHTCPPCPAPEAAGAPSVFLFPPKPKDTLMISRTPEVTCVVVDVSHEDPEVKFNWYVDGVEVHNAKTKPREEQQNSTYRVVSVLTVLHQDWLNGKEYKCKVSNKALKAPIEKTISKAKGQPREPQVYTLPPSRDELTKNQVSLTCLVKGFYPSDIAVEWESNGQPENNYKTTPPVLDSDGSFFLYSKLTVDKSRWQQGNVFSCSVMHEALHNHYTQKSLSLSPGGGGSGGGGSGGGGSTALGRRKAEDRIKETLWADGVKIDEKDFEHIDSSHEDYFAVEYGKGSGYYDVNKKMDSEDTALCVGAVVTNMFHWWVDQNRENIEKFKEQDPENNGVMKFEGVKEATVDELNEFYRDNRDNYADQSRFFDLIKKHFPNKALNPEELFELYFNGFYYGSSHRYIEDNEPAQNNLFSKVLENNKLLNPERSYGIDGFSNNVKNALKSHKVLGLVYTTPLRYRHIISMWGADIDQDGKVKAIYVTDSDDREITFNDNSKRRIGMIRYDVLVDDNGNIRFTGKGKTHKEEGAIYAGLYSLSLGDEVWEDYFKKYPEVQENL

SEQ ID NO: 617 - protein, 557 aa, synthetic construct
DKTHTCPPCPAPEAAGAPSVFLFPPKPKDTLMISRTPEVTCVVVDVSHEDPEVKFNWYVDGVEVHNAKTKPREEQQNSTYRVVSVLTVLHQDWLNGKEYKCKVSNKALKAPIEKTISKAKGQPREPQVYTLPPSRDELTKNQVSLTCLVKGFYPSDIAVEWESNGQPENNYKTTPPVLDSDGSFFLYSKLTVDKSRWQQGNVFSCSVMHEALHNHYTQKSLSLSPGGGGSGGGGSGGGGSTALGRRKAEDRIKETLWADGVKIDEKDFEHIDSSHEDYFAVEYGKGSGYYDVNKKMDSEDTALCVGAVVTNMFHWWVEQNRENIEKFKEQDPENNGVMKFEGVKEATVDELNEFYRDNRDNYADQSRFFDLIKKHFPNKALNPEELFELYFNGFYYGSSHRYIEDNEPAQNNLFSKVLDNNKLLNPERSYGIDGFSNNVKNALKSHKVLGLVYTTPLRYRHIISMWGADIDQDGKVKAIYVTDPDDREITFNDNSKRRIGMIRYDVLVDDNGNIRFTGKGATHKEEGAIYAGLYSLSRGDEVWEDYFKKYPEVQENL

SEQ ID NO: 618 - protein, 557 aa, synthetic construct
DKTHTCPPCPAPEAAGAPSVFLFPPKPKDTLMISRTPEVTCVVVDVSHEDPEVKFNWYVDGVEVHNAKTKPREEQQNSTYRVVSVLTVLHQDWLNGKEYKCKVSNKALKAPIEKTISKAKGQPREPQVYTLPPSRDELTKNQVSLTCLVKGFYPSDIAVEWESNGQPENNYKTTPPVLDSDGSFFLYSKLTVDKSRWQQGNVFSCSVMHEALHNHYTQKSLSLSPGGGGSGGGGSGGGGSTALGRRKAEDRIKETLWADGVKIDEKDFEHIDSSHEDYFAVEYGKGSGYYDVNKKMDSEDTALCVGAVVTNMFHWWVDQNRENIEKFKEQDPENNGVMKFEGVKEATVDELNEFYRDNRDNYADQSRFFDLIKKHFPNKALNPEELFELYFNGFYYGSSHRYIEDNEPAQNNLFSKVLENNKLLNPERSYGIDGFSNNVKNALKSHKVLGLVYTTPLRYRHIISMWGADIDQDGKVKAIYVTDPDDREITFNDNSKRRIGMIRYDVLVDDNGNIRFTGKGKTHKEEGAIYAGLYSLSLGDEVWEDYFKKYPEVQENL

SEQ ID NO: 619 - protein, 557 aa, synthetic construct
DKTHTCPPCPAPEAAGAPSVFLFPPKPKDTLMISRTPEVTCVVVDVSHEDPEVKFNWYVDGVEVHNAKTKPREEQQNSTYRVVSVLTVLHQDWLNGKEYKCKVSNKALKAPIEKTISKAKGQPREPQVYTLPPSRDELTKNQVSLTCLVKGFYPSDIAVEWESNGQPENNYKTTPPVLDSDGSFFLYSKLTVDKSRWQQGNVFSCSVMHEALHNHYTQKSLSLSPGGGGSGGGGSGGGGSTALGRRKAEDRIKETLWADGVKIDEKDFEHIDSSHEDYFAVEYGKGSGYYDVNKKMDSEDTALCVGAVVTNMFHWWVEQNRENIEKFKEQDPENNGVMKFEGVKEATVDELNEFYRDNRDNYADQSRFFDLIKKHFPNKALNPEELFELYFNGFYYGSSHRYIEDNEPAQNNLFSKVLDNNKLLNPERSYGIDGFSNNVKNALKSHKVLGLVYTTPLRYRHIISMWGADIDQDGKVKAIYVTDPDDREITFNDNSKRRIGMIRYDVLVDDNGNIRFTGKGKTHKEEGAIYAGLYSLSLGDEVWEDYFKKYPEVQENL

SEQ ID NO: 620 - protein, 557 aa, synthetic construct
DKTHTCPPCPAPEAAGAPSVFLFPPKPKDTLMISRTPEVTCVVVDVSHEDPEVKFNWYVDGVEVHNAKTKPREEQQNSTYRVVSVLTVLHQDWLNGKEYKCKVSNKALKAPIEKTISKAKGQPREPQVYTLPPSRDELTKNQVSLTCLVKGFYPSDIAVEWESNGQPENNYKTTPPVLDSDGSFFLYSKLTVDKSRWQQGNVFSCSVMHEALHNHYTQKSLSLSPGGGGSGGGGSGGGGSTALGRRKAEDRIKETLWADGVKIDEKDFEHIDSSHEDYFAVEYGKGSGYYDVNKKMDSEDTALCVGAVVTNMFHWWVDQNRENIEKFKEQDPENNGVMKFEGVKEATVDELNEFYRDNRDNYADQSRFFDLIKKHFPNKALNPEELFELYFNGFYYGSSHRYIEDNEPAQNNLFSKVLENNKLLNPERSYGIDGFSNNVKNALKSHKVLGLVYTTPLRYRHIISMWGADIDQDGKVKAIYVTDSDDREITFNDNSKRRIGMIRYDVLVDDEGNIRFTGKGATHKEEGAIYAGLYSLSRGDEVWEDYFKKYPEVQENL

SEQ ID NO: 621 - protein, 557 aa, synthetic construct
DKTHTCPPCPAPEAAGAPSVFLFPPKPKDTLMISRTPEVTCVVVDVSHEDPEVKFNWYVDGVEVHNAKTKPREEQQNSTYRVVSVLTVLHQDWLNGKEYKCKVSNKALKAPIEKTISKAKGQPREPQVYTLPPSRDELTKNQVSLTCLVKGFYPSDIAVEWESNGQPENNYKTTPPVLDSDGSFFLYSKLTVDKSRWQQGNVFSCSVMHEALHNHYTQKSLSLSPGGGGSGGGGSGGGGSTALGRRKAEDRIKETLWADGVKIDEKDFEHIDSSHEDYFAVEYGKGSGYYDVNKKMDSEDTALCVGAVVTNMFHWWVEQNRENIEKFKEQDPENNGVMKFEGVKEATVDELNEFYRDNRDNYADQSRFFDLIKKHFPNKALNPEELFELYFNGFYYGSSHRYIEDNEPAQNNLFSKVLDNNKLLNPERSYGIDGFSNNVKNALKSHKVLGLVYTTPLRYRHIISMWGADIDQDGKVKAIYVTDSDDREITFNDNSKRRIGMIRYDVLVDDEGNIRFTGKGATHKEEGAIYAGLYSLSRGDEVWEDYFKKYPEVQENL

SEQ ID NO: 622 - protein, 557 aa, synthetic construct
DKTHTCPPCPAPEAAGAPSVFLFPPKPKDTLMISRTPEVTCVVVDVSHEDPEVKFNWYVDGVEVHNAKTKPREEQQNSTYRVVSVLTVLHQDWLNGKEYKCKVSNKALKAPIEKTISKAKGQPREPQVYTLPPSRDELTKNQVSLTCLVKGFYPSDIAVEWESNGQPENNYKTTPPVLDSDGSFFLYSKLTVDKSRWQQGNVFSCSVMHEALHNHYTQKSLSLSPGGGGSGGGGSGGGGSTALGRRKAEDRIKETLWADGVKIDEKDFEHIDSSHEDYFAVEYGKGSGYYDVNKKMDSEDTALCVGAVVTNMFHWWVEQNRENIEKFKEQDPENNGVMKFEGVKEATVDELNEFYRDNRDNYADQSRFFDLIKKHFPNKALNPEELFELYFNGFYYGSSHRYIEDNEPAQNNLFSKVLDNNKLLNPERSYGIDGFSNNVKNALKSHKVLGLVYTTPLRYRHIISMWGADIDQDGKVKAIYVTDSDDREITFNDNSKRRIGMIRYDVLVDDEGNIRFTGKGKTHKEEGAIYAGLYSLSLGDEVWEDYFKKYPEVQENL

SEQ ID NO: 623 - protein, 557 aa, synthetic construct
DKTHTCPPCPAPEAAGAPSVFLFPPKPKDTLMISRTPEVTCVVVDVSHEDPEVKFNWYVDGVEVHNAKTKPREEQQNSTYRVVSVLTVLHQDWLNGKEYKCKVSNKALKAPIEKTISKAKGQPREPQVYTLPPSRDELTKNQVSLTCLVKGFYPSDIAVEWESNGQPENNYKTTPPVLDSDGSFFLYSKLTVDKSRWQQGNVFSCSVMHEALHNHYTQKSLSLSPGGGGSGGGGSGGGGSTALGRRKAEDRIKETLWADGVKIDEKDFEHIDSSHEDYFAVEYGKGSGYYDVNKKMDSEDTALCVGAVVTNMFHWWVEQNRENIEKFKEQDPENNGVMKFEGVKEATVDELNEFYRDNRDNYADQSRFFDLIKKHFPNKALNPEELFELYFNGFYYGSSHRYIEDNEPAQNNLFSKVLDNNKLLNPERSYGIDGFSNNVKNALKSHKVLGLVYTTPLRYRHIISMWGADIDQDGKVKAIYVTDPDDREITFNDNSKRRIGMIRYDVLVDDEGNIRFTGKGATHKEEGAIYAGLYSLSRGDEVWEDYFKKYPEVQENL

SEQ ID NO: 624 - protein, 557 aa, synthetic construct
DKTHTCPPCPAPEAAGAPSVFLFPPKPKDTLMISRTPEVTCVVVDVSHEDPEVKFNWYVDGVEVHNAKTKPREEQQNSTYRVVSVLTVLHQDWLNGKEYKCKVSNKALKAPIEKTISKAKGQPREPQVYTLPPSRDELTKNQVSLTCLVKGFYPSDIAVEWESNGQPENNYKTTPPVLDSDGSFFLYSKLTVDKSRWQQGNVFSCSVMHEALHNHYTQKSLSLSPGGGGSGGGGSGGGGSTALGRRKAEDRIKETLWADGVKIDEKDFEHIDSSHEDYFAVEYGKGSGYYDVNKKMDSEDTALCVGAVVTNMFHWWVDQNRENIEKFKEQDPENNGVMKFEGVKEATVDELNEFYRDNRDNYADQSRFFDLIKKHFPNKALNPEELFELYFNGFYYGSSHRYIEDNEPAQNNLFSKVLENNKLLNPERSYGIDGFSNNVKNALKSHKVLGLVYTTPLRYRHIISMWGADIDQDGKVKAIYVTDPDDREITFNDNSKRRIGMIRYDVLVDDEGNIRFTGKGKTHKEEGAIYAGLYSLSLGDEVWEDYFKKYPEVQENL

SEQ ID NO: 625 - protein, 557 aa, synthetic construct
DKTHTCPPCPAPEAAGAPSVFLFPPKPKDTLMISRTPEVTCVVVDVSHEDPEVKFNWYVDGVEVHNAKTKPREEQQNSTYRVVSVLTVLHQDWLNGKEYKCKVSNKALKAPIEKTISKAKGQPREPQVYTLPPSRDELTKNQVSLTCLVKGFYPSDIAVEWESNGQPENNYKTTPPVLDSDGSFFLYSKLTVDKSRWQQGNVFSCSVMHEALHNHYTQKSLSLSPGGGGSGGGGSGGGGSTALGRRKAEDRIKETLWADGVKIDEKDFEHIDSSHEDYFAVEYGKGSGYYDVNKKMDSEDTALCVGAVVTNMFHWWVEQNRENIEKFKEQDPENNGVMKFEGVKEATVDELNEFYRDNRDNYADQSRFFDLIKKHFPNKALNPEELFELYFNGFYYGSSHRYIEDNEPAQNNLFSKVLDNNKLLNPERSYGIDGFSNNVKNALKSHKVLGLVYTTPLRYRHIISMWGADIDQDGKVKAIYVTDPDDREITFNDNSKRRIGMIRYDVLVDDEGNIRFTGKGKTHKEEGAIYAGLYSLSLGDEVWEDYFKKYPEVQENL

SEQ ID NO: 626 - protein, 557 aa, synthetic construct
DKTHTCPPCPAPEAAGAPSVFLFPPKPKDTLMISRTPEVTCVVVDVSHEDPEVKFNWYVDGVEVHNAKTKPREEQQNSTYRVVSVLTVLHQDWLNGKEYKCKVSNKALKAPIEKTISKAKGQPREPQVYTLPPSRDELTKNQVSLTCLVKGFYPSDIAVEWESNGQPENNYKTTPPVLDSDGSFFLYSKLTVDKSRWQQGNVFSCSVMHEALHNHYTQKSLSLSPGGGGSGGGGSGGGGSTALGRRKAEDRIKETLWADGVKIDEKDFEHIKSSHEDYFAVEYGKGSGYYDVNKKMDSEDTALCVGAVVTNMFHWWVDQNRENIEKFKKQDPENNGVMKFEGVKEATVDELNEFYRDNRDNYADQSRFFDLIKKDFGNKALNPEELFELYFNGFYYGSSHRYIEDNEPAQNNLFSKVLENNKLLNPERSYGIDGFSNNVKNALKSHKVLGLVYTTPLRYRHIISMWGADIDQDGKVKAIYVTDSDDREITFNDNSKRRIGMIRYDVLVDDNGNIRFTGKGATHKEEGAIYAGLYSLSRGDEVWEDYFKKYPEVQENL

SEQ ID NO: 627 - protein, 557 aa, synthetic construct
DKTHTCPPCPAPEAAGAPSVFLFPPKPKDTLMISRTPEVTCVVVDVSHEDPEVKFNWYVDGVEVHNAKTKPREEQQNSTYRVVSVLTVLHQDWLNGKEYKCKVSNKALKAPIEKTISKAKGQPREPQVYTLPPSRDELTKNQVSLTCLVKGFYPSDIAVEWESNGQPENNYKTTPPVLDSDGSFFLYSKLTVDKSRWQQGNVFSCSVMHEALHNHYTQKSLSLSPGGGGSGGGGSGGGGSTALGRRKAEDRIKETLWADGVKIDEKDFEHIKSSHEDYFAVEYGKGSGYYDVNKKMDSEDTALCVGAVVTNMFHWWVEQNRENIEKFKKQDPENNGVMKFEGVKEATVDELNEFYRDNRDNYADQSRFFDLIKKDFGNKALNPEELFELYFNGFYYGSSHRYIEDNEPAQNNLFSKVLDNNKLLNPERSYGIDGFSNNVKNALKSHKVLGLVYTTPLRYRHIISMWGADIDQDGKVKAIYVTDSDDREITFNDNSKRRIGMIRYDVLVDDNGNIRFTGKGATHKEEGAIYAGLYSLSRGDEVWEDYFKKYPEVQENL

SEQ ID NO: 628 - protein, 557 aa, synthetic construct
DKTHTCPPCPAPEAAGAPSVFLFPPKPKDTLMISRTPEVTCVVVDVSHEDPEVKFNWYVDGVEVHNAKTKPREEQQNSTYRVVSVLTVLHQDWLNGKEYKCKVSNKALKAPIEKTISKAKGQPREPQVYTLPPSRDELTKNQVSLTCLVKGFYPSDIAVEWESNGQPENNYKTTPPVLDSDGSFFLYSKLTVDKSRWQQGNVFSCSVMHEALHNHYTQKSLSLSPGGGGSGGGGSGGGGSTALGRRKAEDRIKETLWADGVKIDEKDFEHIKSSHEDYFAVEYGKGSGYYDVNKKMDSEDTALCVGAVVTNMFHWWVDQNRENIEKFKKQDPENNGVMKFEGVKEATVDELNEFYRDNRDNYADQSRFFDLIKKDFGNKALNPEELFELYFNGFYYGSSHRYIEDNEPAQNNLFSKVLENNKLLNPERSYGIDGFSNNVKNALKSHKVLGLVYTTPLRYRHIISMWGADIDQDGKVKAIYVTDSDDREITFNDNSKRRIGMIRYDVLVDDNGNIRFTGKGKTHKEEGAIYAGLYSLSLGDEVWEDYFKKYPEVQENL

SEQ ID NO: 629 - protein, 557 aa, synthetic construct
DKTHTCPPCPAPEAAGAPSVFLFPPKPKDTLMISRTPEVTCVVVDVSHEDPEVKFNWYVDGVEVHNAKTKPREEQQNSTYRVVSVLTVLHQDWLNGKEYKCKVSNKALKAPIEKTISKAKGQPREPQVYTLPPSRDELTKNQVSLTCLVKGFYPSDIAVEWESNGQPENNYKTTPPVLDSDGSFFLYSKLTVDKSRWQQGNVFSCSVMHEALHNHYTQKSLSLSPGGGGSGGGGSGGGGSTALGRRKAEDRIKETLWADGVKIDEKDFEHIKSSHEDYFAVEYGKGSGYYDVNKKMDSEDTALCVGAVVTNMFHWWVEQNRENIEKFKKQDPENNGVMKFEGVKEATVDELNEFYRDNRDNYADQSRFFDLIKKDFGNKALNPEELFELYFNGFYYGSSHRYIEDNEPAQNNLFSKVLDNNKLLNPERSYGIDGFSNNVKNALKSHKVLGLVYTTPLRYRHIISMWGADIDQDGKVKAIYVTDSDDREITFNDNSKRRIGMIRYDVLVDDNGNIRFTGKGKTHKEEGAIYAGLYSLSLGDEVWEDYFKKYPEVQENL

SEQ ID NO: 630 - protein, 557 aa, synthetic construct
DKTHTCPPCPAPEAAGAPSVFLFPPKPKDTLMISRTPEVTCVVVDVSHEDPEVKFNWYVDGVEVHNAKTKPREEQQNSTYRVVSVLTVLHQDWLNGKEYKCKVSNKALKAPIEKTISKAKGQPREPQVYTLPPSRDELTKNQVSLTCLVKGFYPSDIAVEWESNGQPENNYKTTPPVLDSDGSFFLYSKLTVDKSRWQQGNVFSCSVMHEALHNHYTQKSLSLSPGGGGSGGGGSGGGGSTALGRRKAEDRIKETLWADGVKIDEKDFEHIDSSHEDYFAVEYGKGSGYYDVNKKMDSEDTALCVGAVVTNMFHWWVEQNRENIEKFKEQDPENNGVMKFEGVKEATVDELNEFYRDNRDNYADQSRFFDLIKKDFGNKALNPEELFELYFNGFYYGSSHRYIEDNEPAQNNLFSKVLDNNKLLNPERSYGIDGFSNNVKNALKSHKVLGLVYTTPLRYRHIISMWGADIDQDGKVKAIYVTDSDDREITFNDNSKRRIGMIRYDVLVDDNGNIRFTGKGATHKEEGAIYAGLYSLSRGDEVWEDYFKKYPEVQENL

SEQ ID NO: 631 - protein, 557 aa, synthetic construct
DKTHTCPPCPAPEAAGAPSVFLFPPKPKDTLMISRTPEVTCVVVDVSHEDPEVKFNWYVDGVEVHNAKTKPREEQQNSTYRVVSVLTVLHQDWLNGKEYKCKVSNKALKAPIEKTISKAKGQPREPQVYTLPPSRDELTKNQVSLTCLVKGFYPSDIAVEWESNGQPENNYKTTPPVLDSDGSFFLYSKLTVDKSRWQQGNVFSCSVMHEALHNHYTQKSLSLSPGGGGSGGGGSGGGGSTALGRRKAEDRIKETLWADGVKIDEKDFEHIDSSHEDYFAVEYGKGSGYYDVNKKMDSEDTALCVGAVVTNMFHWWVDQNRENIEKFKEQDPENNGVMKFEGVKEATVDELNEFYRDNRDNYADQSRFFDLIKKDFGNKALNPEELFELYFNGFYYGSSHRYIEDNEPAQNNLFSKVLENNKLLNPERSYGIDGFSNNVKNALKSHKVLGLVYTTPLRYRHIISMWGADIDQDGKVKAIYVTDSDDREITFNDNSKRRIGMIRYDVLVDDNGNIRFTGKGKTHKEEGAIYAGLYSLSLGDEVWEDYFKKYPEVQENL

SEQ ID NO: 632 - protein, 557 aa, synthetic construct
DKTHTCPPCPAPEAAGAPSVFLFPPKPKDTLMISRTPEVTCVVVDVSHEDPEVKFNWYVDGVEVHNAKTKPREEQQNSTYRVVSVLTVLHQDWLNGKEYKCKVSNKALKAPIEKTISKAKGQPREPQVYTLPPSRDELTKNQVSLTCLVKGFYPSDIAVEWESNGQPENNYKTTPPVLDSDGSFFLYSKLTVDKSRWQQGNVFSCSVMHEALHNHYTQKSLSLSPGGGGSGGGGSGGGGSTALGRRKAEDRIKETLWADGVKIDEKDFEHIDSSHEDYFAVEYGKGSGYYDVNKKMDSEDTALCVGAVVTNMFHWWVEQNRENIEKFKEQDPENNGVMKFEGVKEATVDELNEFYRDNRDNYADQSRFFDLIKKDFGNKALNPEELFELYFNGFYYGSSHRYIEDNEPAQNNLFSKVLDNNKLLNPERSYGIDGFSNNVKNALKSHKVLGLVYTTPLRYRHIISMWGADIDQDGKVKAIYVTDPDDREITFNDNSKRRIGMIRYDVLVDDNGNIRFTGKGATHKEEGAIYAGLYSLSRGDEVWEDYFKKYPEVQENL

SEQ ID NO: 633 - protein, 557 aa, synthetic construct
DKTHTCPPCPAPEAAGAPSVFLFPPKPKDTLMISRTPEVTCVVVDVSHEDPEVKFNWYVDGVEVHNAKTKPREEQQNSTYRVVSVLTVLHQDWLNGKEYKCKVSNKALKAPIEKTISKAKGQPREPQVYTLPPSRDELTKNQVSLTCLVKGFYPSDIAVEWESNGQPENNYKTTPPVLDSDGSFFLYSKLTVDKSRWQQGNVFSCSVMHEALHNHYTQKSLSLSPGGGGSGGGGSGGGGSTALGRRKAEDRIKETLWADGVKIDEKDFEHIDSSHEDYFAVEYGKGSGYYDVNKKMDSEDTALCVGAVVTNMFHWWVDQNRENIEKFKEQDPENNGVMKFEGVKEATVDELNEFYRDNRDNYADQSRFFDLIKKDFGNKALNPEELFELYFNGFYYGSSHRYIEDNEPAQNNLFSKVLENNKLLNPERSYGIDGFSNNVKNALKSHKVLGLVYTTPLRYRHIISMWGADIDQDGKVKAIYVTDPDDREITFNDNSKRRIGMIRYDVLVDDNGNIRFTGKGKTHKEEGAIYAGLYSLSLGDEVWEDYFKKYPEVQENL

SEQ ID NO: 634 - protein, 557 aa, synthetic construct
DKTHTCPPCPAPEAAGAPSVFLFPPKPKDTLMISRTPEVTCVVVDVSHEDPEVKFNWYVDGVEVHNAKTKPREEQQNSTYRVVSVLTVLHQDWLNGKEYKCKVSNKALKAPIEKTISKAKGQPREPQVYTLPPSRDELTKNQVSLTCLVKGFYPSDIAVEWESNGQPENNYKTTPPVLDSDGSFFLYSKLTVDKSRWQQGNVFSCSVMHEALHNHYTQKSLSLSPGGGGSGGGGSGGGGSTALGRRKAEDRIKETLWADGVKIDEKDFEHIDSSHEDYFAVEYGKGSGYYDVNKKMDSEDTALCVGAVVTNMFHWWVEQNRENIEKFKEQDPENNGVMKFEGVKEATVDELNEFYRDNRDNYADQSRFFDLIKKDFGNKALNPEELFELYFNGFYYGSSHRYIEDNEPAQNNLFSKVLDNNKLLNPERSYGIDGFSNNVKNALKSHKVLGLVYTTPLRYRHIISMWGADIDQDGKVKAIYVTDPDDREITFNDNSKRRIGMIRYDVLVDDNGNIRFTGKGKTHKEEGAIYAGLYSLSLGDEVWEDYFKKYPEVQENL

SEQ ID NO: 635 - protein, 557 aa, synthetic construct
DKTHTCPPCPAPEAAGAPSVFLFPPKPKDTLMISRTPEVTCVVVDVSHEDPEVKFNWYVDGVEVHNAKTKPREEQQNSTYRVVSVLTVLHQDWLNGKEYKCKVSNKALKAPIEKTISKAKGQPREPQVYTLPPSRDELTKNQVSLTCLVKGFYPSDIAVEWESNGQPENNYKTTPPVLDSDGSFFLYSKLTVDKSRWQQGNVFSCSVMHEALHNHYTQKSLSLSPGGGGSGGGGSGGGGSTALGRRKAEDRIKETLWADGVKIDEKDFEHIDSSHEDYFAVEYGKGSGYYDVNKKMDSEDTALCVGAVVTNMFHWWVDQNRENIEKFKEQDPENNGVMKFEGVKEATVDELNEFYRDNRDNYADQSRFFDLIKKDFGNKALNPEELFELYFNGFYYGSSHRYIEDNEPAQNNLFSKVLENNKLLNPERSYGIDGFSNNVKNALKSHKVLGLVYTTPLRYRHIISMWGADIDQDGKVKAIYVTDSDDREITFNDNSKRRIGMIRYDVLVDDEGNIRFTGKGATHKEEGAIYAGLYSLSRGDEVWEDYFKKYPEVQENL

SEQ ID NO: 636 - protein, 557 aa, synthetic construct
DKTHTCPPCPAPEAAGAPSVFLFPPKPKDTLMISRTPEVTCVVVDVSHEDPEVKFNWYVDGVEVHNAKTKPREEQQNSTYRVVSVLTVLHQDWLNGKEYKCKVSNKALKAPIEKTISKAKGQPREPQVYTLPPSRDELTKNQVSLTCLVKGFYPSDIAVEWESNGQPENNYKTTPPVLDSDGSFFLYSKLTVDKSRWQQGNVFSCSVMHEALHNHYTQKSLSLSPGGGGSGGGGSGGGGSTALGRRKAEDRIKETLWADGVKIDEKDFEHIDSSHEDYFAVEYGKGSGYYDVNKKMDSEDTALCVGAVVTNMFHWWVEQNRENIEKFKEQDPENNGVMKFEGVKEATVDELNEFYRDNRDNYADQSRFFDLIKKDFGNKALNPEELFELYFNGFYYGSSHRYIEDNEPAQNNLFSKVLDNNKLLNPERSYGIDGFSNNVKNALKSHKVLGLVYTTPLRYRHIISMWGADIDQDGKVKAIYVTDSDDREITFNDNSKRRIGMIRYDVLVDDEGNIRFTGKGATHKEEGAIYAGLYSLSRGDEVWEDYFKKYPEVQENL

SEQ ID NO: 637 - protein, 557 aa, synthetic construct
DKTHTCPPCPAPEAAGAPSVFLFPPKPKDTLMISRTPEVTCVVVDVSHEDPEVKFNWYVDGVEVHNAKTKPREEQQNSTYRVVSVLTVLHQDWLNGKEYKCKVSNKALKAPIEKTISKAKGQPREPQVYTLPPSRDELTKNQVSLTCLVKGFYPSDIAVEWESNGQPENNYKTTPPVLDSDGSFFLYSKLTVDKSRWQQGNVFSCSVMHEALHNHYTQKSLSLSPGGGGSGGGGSGGGGSTALGRRKAEDRIKETLWADGVKIDEKDFEHIDSSHEDYFAVEYGKGSGYYDVNKKMDSEDTALCVGAVVTNMFHWWVEQNRENIEKFKEQDPENNGVMKFEGVKEATVDELNEFYRDNRDNYADQSRFFDLIKKDFGNKALNPEELFELYFNGFYYGSSHRYIEDNEPAQNNLFSKVLDNNKLLNPERSYGIDGFSNNVKNALKSHKVLGLVYTTPLRYRHIISMWGADIDQDGKVKAIYVTDSDDREITFNDNSKRRIGMIRYDVLVDDEGNIRFTGKGKTHKEEGAIYAGLYSLSLGDEVWEDYFKKYPEVQENL

SEQ ID NO: 638 - protein, 557 aa, synthetic construct
DKTHTCPPCPAPEAAGAPSVFLFPPKPKDTLMISRTPEVTCVVVDVSHEDPEVKFNWYVDGVEVHNAKTKPREEQQNSTYRVVSVLTVLHQDWLNGKEYKCKVSNKALKAPIEKTISKAKGQPREPQVYTLPPSRDELTKNQVSLTCLVKGFYPSDIAVEWESNGQPENNYKTTPPVLDSDGSFFLYSKLTVDKSRWQQGNVFSCSVMHEALHNHYTQKSLSLSPGGGGSGGGGSGGGGSTALGRRKAEDRIKETLWADGVKIDEKDFEHIDSSHEDYFAVEYGKGSGYYDVNKKMDSEDTALCVGAVVTNMFHWWVEQNRENIEKFKEQDPENNGVMKFEGVKEATVDELNEFYRDNRDNYADQSRFFDLIKKDFGNKALNPEELFELYFNGFYYGSSHRYIEDNEPAQNNLFSKVLDNNKLLNPERSYGIDGFSNNVKNALKSHKVLGLVYTTPLRYRHIISMWGADIDQDGKVKAIYVTDPDDREITFNDNSKRRIGMIRYDVLVDDEGNIRFTGKGATHKEEGAIYAGLYSLSRGDEVWEDYFKKYPEVQENL

SEQ ID NO: 639 - protein, 557 aa, synthetic construct
DKTHTCPPCPAPEAAGAPSVFLFPPKPKDTLMISRTPEVTCVVVDVSHEDPEVKFNWYVDGVEVHNAKTKPREEQQNSTYRVVSVLTVLHQDWLNGKEYKCKVSNKALKAPIEKTISKAKGQPREPQVYTLPPSRDELTKNQVSLTCLVKGFYPSDIAVEWESNGQPENNYKTTPPVLDSDGSFFLYSKLTVDKSRWQQGNVFSCSVMHEALHNHYTQKSLSLSPGGGGSGGGGSGGGGSTALGRRKAEDRIKETLWADGVKIDEKDFEHIDSSHEDYFAVEYGKGSGYYDVNKKMDSEDTALCVGAVVTNMFHWWVDQNRENIEKFKEQDPENNGVMKFEGVKEATVDELNEFYRDNRDNYADQSRFFDLIKKDFGNKALNPEELFELYFNGFYYGSSHRYIEDNEPAQNNLFSKVLENNKLLNPERSYGIDGFSNNVKNALKSHKVLGLVYTTPLRYRHIISMWGADIDQDGKVKAIYVTDPDDREITFNDNSKRRIGMIRYDVLVDDEGNIRFTGKGKTHKEEGAIYAGLYSLSLGDEVWEDYFKKYPEVQENL

SEQ ID NO: 640 - protein, 557 aa, synthetic construct
DKTHTCPPCPAPEAAGAPSVFLFPPKPKDTLMISRTPEVTCVVVDVSHEDPEVKFNWYVDGVEVHNAKTKPREEQQNSTYRVVSVLTVLHQDWLNGKEYKCKVSNKALKAPIEKTISKAKGQPREPQVYTLPPSRDELTKNQVSLTCLVKGFYPSDIAVEWESNGQPENNYKTTPPVLDSDGSFFLYSKLTVDKSRWQQGNVFSCSVMHEALHNHYTQKSLSLSPGGGGSGGGGSGGGGSTALGRRKAEDRIKETLWADGVKIDEKDFEHIDSSHEDYFAVEYGKGSGYYDVNKKMDSEDTALCVGAVVTNMFHWWVEQNRENIEKFKEQDPENNGVMKFEGVKEATVDELNEFYRDNRDNYADQSRFFDLIKKDFGNKALNPEELFELYFNGFYYGSSHRYIEDNEPAQNNLFSKVLDNNKLLNPERSYGIDGFSNNVKNALKSHKVLGLVYTTPLRYRHIISMWGADIDQDGKVKAIYVTDPDDREITFNDNSKRRIGMIRYDVLVDDEGNIRFTGKGKTHKEEGAIYAGLYSLSLGDEVWEDYFKKYPEVQENL

SEQ ID NO: 641 - protein, 557 aa, synthetic construct
DKTHTCPPCPAPEAAGAPSVFLFPPKPKDTLMISRTPEVTCVVVDVSHEDPEVKFNWYVDGVEVHNAKTKPREEQQNSTYRVVSVLTVLHQDWLNGKEYKCKVSNKALKAPIEKTISKAKGQPREPQVYTLPPSRDELTKNQVSLTCLVKGFYPSDIAVEWESNGQPENNYKTTPPVLDSDGSFFLYSKLTVDKSRWQQGNVFSCSVMHEALHNHYTQKSLSLSPGGGGSGGGGSGGGGSTALGRRKAEDRIKETLWADGVKIDEKDFEHIDSSHEDYFAVEYGKGSGYYDVNKKMDSEDTALCVGAVVTNMFHWWVDQNRENIEKFKEQDPENNGVMKFEGVKEATVDELNEFYRDNRDNYADQSRFFDLIKKHFPNKALNPEELFELYFNGFYYGSSHRYIEDNEPAQNNLFSKVLENNKLLNPERSYGIDGFSNNVINALKSHKVLGLVYTTPLRYRHIISMWGADIDQDGKVKAIYVTDSDDREITFNDNSKRRIGMIRYDVLVDDNGNIRFTGKGATHKEEGAIYAGLYSLSRGDEVWEDYFKKYPEVQENL

SEQ ID NO: 642 - protein, 557 aa, synthetic construct
DKTHTCPPCPAPEAAGAPSVFLFPPKPKDTLMISRTPEVTCVVVDVSHEDPEVKFNWYVDGVEVHNAKTKPREEQQNSTYRVVSVLTVLHQDWLNGKEYKCKVSNKALKAPIEKTISKAKGQPREPQVYTLPPSRDELTKNQVSLTCLVKGFYPSDIAVEWESNGQPENNYKTTPPVLDSDGSFFLYSKLTVDKSRWQQGNVFSCSVMHEALHNHYTQKSLSLSPGGGGSGGGGSGGGGSTALGRRKAEDRIKETLWADGVKIDEKDFEHIKSSHEDYFAVEYGKGSGYYDVNKKMDSEDTALCVGAVVTNMFHWWVEQNRENIEKFKKQDPENNGVMKFEGVKEATVDELNEFYRDNRDNYADQSRFFDLIKKHFPNKALNPEELFELYFNGFYYGSSHRYIEDNEPAQNNLFSKVLDNNKLLNPERSYGIDGFSNNVINALKSHKVLGLVYTTPLRYRHIISMWGADIDQDGKVKAIYVTDSDDREITFNDNSKRRIGMIRYDVLVDDNGNIRFTGKGATHKEEGAIYAGLYSLSRGDEVWEDYFKKYPEVQENL

SEQ ID NO: 643 - protein, 557 aa, synthetic construct
DKTHTCPPCPAPEAAGAPSVFLFPPKPKDTLMISRTPEVTCVVVDVSHEDPEVKFNWYVDGVEVHNAKTKPREEQQNSTYRVVSVLTVLHQDWLNGKEYKCKVSNKALKAPIEKTISKAKGQPREPQVYTLPPSRDELTKNQVSLTCLVKGFYPSDIAVEWESNGQPENNYKTTPPVLDSDGSFFLYSKLTVDKSRWQQGNVFSCSVMHEALHNHYTQKSLSLSPGGGGSGGGGSGGGGSTALGRRKAEDRIKETLWADGVKIDEKDFEHIKSSHEDYFAVEYGKGSGYYDVNKKMDSEDTALCVGAVVTNMFHWWVDQNRENIEKFKKQDPENNGVMKFEGVKEATVDELNEFYRDNRDNYADQSRFFDLIKKHFPNKALNPEELFELYFNGFYYGSSHRYIEDNEPAQNNLFSKVLENNKLLNPERSYGIDGFSNNVINALKSHKVLGLVYTTPLRYRHIISMWGADIDQDGKVKAIYVTDSDDREITFNDNSKRRIGMIRYDVLVDDNGNIRFTGKGKTHKEEGAIYAGLYSLSLGDEVWEDYFKKYPEVQENL

SEQ ID NO: 644 - protein, 557 aa, synthetic construct
DKTHTCPPCPAPEAAGAPSVFLFPPKPKDTLMISRTPEVTCVVVDVSHEDPEVKFNWYVDGVEVHNAKTKPREEQQNSTYRVVSVLTVLHQDWLNGKEYKCKVSNKALKAPIEKTISKAKGQPREPQVYTLPPSRDELTKNQVSLTCLVKGFYPSDIAVEWESNGQPENNYKTTPPVLDSDGSFFLYSKLTVDKSRWQQGNVFSCSVMHEALHNHYTQKSLSLSPGGGGSGGGGSGGGGSTALGRRKAEDRIKETLWADGVKIDEKDFEHIKSSHEDYFAVEYGKGSGYYDVNKKMDSEDTALCVGAVVTNMFHWWVEQNRENIEKFKKQDPENNGVMKFEGVKEATVDELNEFYRDNRDNYADQSRFFDLIKKHFPNKALNPEELFELYFNGFYYGSSHRYIEDNEPAQNNLFSKVLDNNKLLNPERSYGIDGFSNNVINALKSHKVLGLVYTTPLRYRHIISMWGADIDQDGKVKAIYVTDSDDREITFNDNSKRRIGMIRYDVLVDDNGNIRFTGKGKTHKEEGAIYAGLYSLSLGDEVWEDYFKKYPEVQENL

SEQ ID NO: 645 - protein, 557 aa, synthetic construct
DKTHTCPPCPAPEAAGAPSVFLFPPKPKDTLMISRTPEVTCVVVDVSHEDPEVKFNWYVDGVEVHNAKTKPREEQQNSTYRVVSVLTVLHQDWLNGKEYKCKVSNKALKAPIEKTISKAKGQPREPQVYTLPPSRDELTKNQVSLTCLVKGFYPSDIAVEWESNGQPENNYKTTPPVLDSDGSFFLYSKLTVDKSRWQQGNVFSCSVMHEALHNHYTQKSLSLSPGGGGSGGGGSGGGGSTALGRRKAEDRIKETLWADGVKIDEKDFEHIDSSHEDYFAVEYGKGSGYYDVNKKMDSEDTALCVGAVVTNMFHWWVEQNRENIEKFKEQDPENNGVMKFEGVKEATVDELNEFYRDNRDNYADQSRFFDLIKKHFPNKALNPEELFELYFNGFYYGSSHRYIEDNEPAQNNLFSKVLDNNKLLNPERSYGIDGFSNNVINALKSHKVLGLVYTTPLRYRHIISMWGADIDQDGKVKAIYVTDSDDREITFNDNSKRRIGMIRYDVLVDDNGNIRFTGKGATHKEEGAIYAGLYSLSRGDEVWEDYFKKYPEVQENL

SEQ ID NO: 646 - protein, 557 aa, synthetic construct
DKTHTCPPCPAPEAAGAPSVFLFPPKPKDTLMISRTPEVTCVVVDVSHEDPEVKFNWYVDGVEVHNAKTKPREEQQNSTYRVVSVLTVLHQDWLNGKEYKCKVSNKALKAPIEKTISKAKGQPREPQVYTLPPSRDELTKNQVSLTCLVKGFYPSDIAVEWESNGQPENNYKTTPPVLDSDGSFFLYSKLTVDKSRWQQGNVFSCSVMHEALHNHYTQKSLSLSPGGGGSGGGGSGGGGSTALGRRKAEDRIKETLWADGVKIDEKDFEHIDSSHEDYFAVEYGKGSGYYDVNKKMDSEDTALCVGAVVTNMFHWWVDQNRENIEKFKEQDPENNGVMKFEGVKEATVDELNEFYRDNRDNYADQSRFFDLIKKHFPNKALNPEELFELYFNGFYYGSSHRYIEDNEPAQNNLFSKVLENNKLLNPERSYGIDGFSNNVINALKSHKVLGLVYTTPLRYRHIISMWGADIDQDGKVKAIYVTDSDDREITFNDNSKRRIGMIRYDVLVDDNGNIRFTGKGKTHKEEGAIYAGLYSLSLGDEVWEDYFKKYPEVQENL

SEQ ID NO: 647 - protein, 557 aa, synthetic construct
DKTHTCPPCPAPEAAGAPSVFLFPPKPKDTLMISRTPEVTCVVVDVSHEDPEVKFNWYVDGVEVHNAKTKPREEQQNSTYRVVSVLTVLHQDWLNGKEYKCKVSNKALKAPIEKTISKAKGQPREPQVYTLPPSRDELTKNQVSLTCLVKGFYPSDIAVEWESNGQPENNYKTTPPVLDSDGSFFLYSKLTVDKSRWQQGNVFSCSVMHEALHNHYTQKSLSLSPGGGGSGGGGSGGGGSTALGRRKAEDRIKETLWADGVKIDEKDFEHIKSSHEDYFAVEYGKGSGYYDVNKKMDSEDTALCVGAVVTNMFHWWVDQNRENIEKFKKQDPENNGVMKFEGVKEATVDELNHFYRDNRDNYADQSRFFDLIKKHFGNKALNPEELFELYFNGFYYGSSHRYIEDNEPAQNNLFSKVLDNNKLLNPERSYGIDGFSNNVINALKSHKVLGLVYTTPLRYRHIISMWGADIDQDGKVKAIYVTDSDDREITFNDNSKRRIGMIRYDVLVDDNGNIRFTGKGATHKEEGAIYAGLYSLSRGDEVWEDYFKKYPEVQENL

SEQ ID NO: 648 - protein, 557 aa, synthetic construct
DKTHTCPPCPAPEAAGAPSVFLFPPKPKDTLMISRTPEVTCVVVDVSHEDPEVKFNWYVDGVEVHNAKTKPREEQQNSTYRVVSVLTVLHQDWLNGKEYKCKVSNKALKAPIEKTISKAKGQPREPQVYTLPPSRDELTKNQVSLTCLVKGFYPSDIAVEWESNGQPENNYKTTPPVLDSDGSFFLYSKLTVDKSRWQQGNVFSCSVMHEALHNHYTQKSLSLSPGGGGSGGGGSGGGGSTALGRRKAEDRIKETLWADGVKIDEKDFEHIKSSHEDYFAVEYGKGSGYYDVNKKMDSEDTALCVGAVVTNMFHWWVDQNRENIEKFKKQDPENNGVMKFEGVKEATVDELNHFYRDNRDNYADQSRFFDLIKKHFGNKALNPEELFELYFNGFYYGSSHRYIEDNEPAQNNLFSKVLENNKLLNPERSYGIDGFSNNVINALKSHKVLGLVYTTPLRYRHIISMWGADIDQDGKVKAIYVTDSDDREITFNDNSKRRIGMIRYDVLVDDNGNIRFTGKGKTHKEEGAIYAGLYSLSRGDEVWEDYFKKYPEVQENL

SEQ ID NO: 649 - protein, 557 aa, synthetic construct
DKTHTCPPCPAPEAAGAPSVFLFPPKPKDTLMISRTPEVTCVVVDVSHEDPEVKFNWYVDGVEVHNAKTKPREEQQNSTYRVVSVLTVLHQDWLNGKEYKCKVSNKALKAPIEKTISKAKGQPREPQVYTLPPSRDELTKNQVSLTCLVKGFYPSDIAVEWESNGQPENNYKTTPPVLDSDGSFFLYSKLTVDKSRWQQGNVFSCSVMHEALHNHYTQKSLSLSPGGGGSGGGGSGGGGSTALGRRKAEDRIKETLWADGVKIDEKDFEHIKSSHEDYFAVEYGKGSGYYDVNKKMDSEDTALCVGAVVTNMFHWWVDQNRENIEKFKKQDPENNGVMKFEGVKEATVDELNEFYRDNRDNYADQSRFFDLIKKHFGNKALNPEELFELYFNGFYYGSSHRYIEDNEPAQNNLFSKVLENNKLLNPERSYGIDGFSNNVINALKSHKVLGLVYTTPLRYRHIISMWGADIDQDGKVKAIYVTDSDDREITFNDNSKRRIGMIRYDVLVDDNGNIRFTGKGATHKEEGAIYAGLYSLSRGDEVWEDYFKKYPEVQENL

SEQ ID NO: 650 - protein, 557 aa, synthetic construct
DKTHTCPPCPAPEAAGAPSVFLFPPKPKDTLMISRTPEVTCVVVDVSHEDPEVKFNWYVDGVEVHNAKTKPREEQQNSTYRVVSVLTVLHQDWLNGKEYKCKVSNKALKAPIEKTISKAKGQPREPQVYTLPPSRDELTKNQVSLTCLVKGFYPSDIAVEWESNGQPENNYKTTPPVLDSDGSFFLYSKLTVDKSRWQQGNVFSCSVMHEALHNHYTQKSLSLSPGGGGSGGGGSGGGGSTALGRRKAEDRIKETLWADGVKIDEKDFEHIKSSHEDYFAVEYGKGSGYYDVNKKMDSEDTALCVGAVVTNMFHWWVDQNRENIEKFKKQDPENNGVMKFEGVKEATVDELNHFYRDNRDNYADQSRFFDLIKKHFGNKALNPEELFELYFNGFYYGSSHRYIEDNEPAQNNLFSKVLENNKLLNPERSYGIDGFSNNVINALKSHKVLGLVYTTPLRYRHIISMWGADIDQDGKVKAIYVTDSDDREITFNDNSKRRIGMIRYDVLVDDEGNIRFTGKGATHKEEGAIYAGLYSLSRGDEVWEDYFKKYPEVQENL

SEQ ID NO: 651 - protein, 557 aa, synthetic construct
DKTHTCPPCPAPEAAGAPSVFLFPPKPKDTLMISRTPEVTCVVVDVSHEDPEVKFNWYVDGVEVHNAKTKPREEQQNSTYRVVSVLTVLHQDWLNGKEYKCKVSNKALKAPIEKTISKAKGQPREPQVYTLPPSRDELTKNQVSLTCLVKGFYPSDIAVEWESNGQPENNYKTTPPVLDSDGSFFLYSKLTVDKSRWQQGNVFSCSVMHEALHNHYTQKSLSLSPGGGGSGGGGSGGGGSTALGRRKAEDRIKETLWADGVKIDEKDFEHIKSSHEDYFAVEYGKGSGYYDVNKKMDSEDTALCVGAVVTNMFHWWVDQNRENIEKFKKQDPENNGVMKFEGVKEATVDELNHFYRDNRDNYADQSRFFDLIKKHFGNKALNPEELFELYFNGFYYGSSHRYIEDNEPAQNNLFSKVLENNKLLNPERSYGIDGFSNNVINALKSHKVLGLVYTTPLRYGHIISMWGADIDQDGKVKAIYVTDSDDREITFNDNSKRRIGMIRYDVLVDDNGNIRFTGKGATHKEEGAIYAGLYSLSRGDEVWEDYFKKYPEVQENL

SEQ ID NO: 652 - protein, 557 aa, synthetic construct
DKTHTCPPCPAPEAAGAPSVFLFPPKPKDTLMISRTPEVTCVVVDVSHEDPEVKFNWYVDGVEVHNAKTKPREEQQNSTYRVVSVLTVLHQDWLNGKEYKCKVSNKALKAPIEKTISKAKGQPREPQVYTLPPSRDELTKNQVSLTCLVKGFYPSDIAVEWESNGQPENNYKTTPPVLDSDGSFFLYSKLTVDKSRWQQGNVFSCSVMHEALHNHYTQKSLSLSPGGGGSGGGGSGGGGSTALGRRKAEDRIKETLWADGVKIDEKDFEHIKSSHEDYFAVEYGKGSGYYDVNKKMDSEDTALCVGAVVTNMFHWWVDQNRENIEKFKKQDPENNGVMKFEGVKEATVDELNHFYRDNRDNYADQSRFFDLIKKDFGNKALNPEELFELYFNGFYYGSSHRYIEDNEPAQNNLFSKVLENNKLLNPERSYGIDGFSNNVINALKSHKVLGLVYTTPLRYRHIISMWGADIDQDGKVKAIYVTDSDDREITFNDNSKRRIGMIRYDVLVDDNGNIRFTGKGATHKEEGAIYAGLYSLSRGDEVWEDYFKKYPEVQENL

SEQ ID NO: 653 - protein, 557 aa, synthetic construct
DKTHTCPPCPAPEAAGAPSVFLFPPKPKDTLMISRTPEVTCVVVDVSHEDPEVKFNWYVDGVEVHNAKTKPREEQQNSTYRVVSVLTVLHQDWLNGKEYKCKVSNKALKAPIEKTISKAKGQPREPQVYTLPPSRDELTKNQVSLTCLVKGFYPSDIAVEWESNGQPENNYKTTPPVLDSDGSFFLYSKLTVDKSRWQQGNVFSCSVMHEALHNHYTQKSLSLSPGGGGSGGGGSGGGGSTALGRRKAEDRIKETLWADGVKIDEKDFEHIKSSHEDYFAVEYGKGSGYYDVNKKMDSEDTALCVGAVVTNMFHWWVDQNRENIEKFKKQDPENNGVMKFEGVKEATVDELNHFYRDNRDNYADQSRFFDLIKKHFGNKALNPEELFELYFNGFYYGSSHRYIEDNEPAQNNLFSKVLENNKLLNPERSYGIDGFSNNVINALKSHKVLGLVYTTPLRYRHIISMWGADIDQDGKVKAIYVTDSDDREITFNDNSKRRIGMIRYDVLVDDNGNIRFTGKGATHKEEGAIYAGLYSLSLGDEVWEDYFKKYPEVQENL

SEQ ID NO: 654 - protein, 557 aa, synthetic construct
DKTHTCPPCPAPEAAGAPSVFLFPPKPKDTLMISRTPEVTCVVVDVSHEDPEVKFNWYVDGVEVHNAKTKPREEQQNSTYRVVSVLTVLHQDWLNGKEYKCKVSNKALKAPIEKTISKAKGQPREPQVYTLPPSRDELTKNQVSLTCLVKGFYPSDIAVEWESNGQPENNYKTTPPVLDSDGSFFLYSKLTVDKSRWQQGNVFSCSVMHEALHNHYTQKSLSLSPGGGGSGGGGSGGGGSTALGRRKAEDRIKETLWADGVKIDEKDFEHIKSSHEDYFAVEYGKGSGYYDVNKKMDSEDTALCVGAVVTNMFHWWVDQNRENIEKFKKQDPENNGVMKFEGVKEATVDELNHFYRDNRDNYADQSRFFDLIKKHFGNKALNPEELFELYFNGFYYGSSHRYIEDNEPAQNNLFSKVLENNKLLNPERSYGIDGFSNNVKNALKSHKVLGLVYTTPLRYRHIISMWGADIDQDGKVKAIYVTDSDDREITFNDNSKRRIGMIRYDVLVDDNGNIRFTGKGATHKEEGAIYAGLYSLSRGDEVWEDYFKKYPEVQENL

SEQ ID NO: 655 - skipped

SEQ ID NO: 656 - protein, 557 aa, synthetic construct
DKTHTCPPCPAPEAAGAPSVFLFPPKPKDTLMISRTPEVTCVVVDVSHEDPEVKFNWYVDGVEVHNAKTKPREEQQNSTYRVVSVLTVLHQDWLNGKEYKCKVSNKALKAPIEKTISKAKGQPREPQVYTLPPSRDELTKNQVSLTCLVKGFYPSDIAVEWESNGQPENNYKTTPPVLDSDGSFFLYSKLTVDKSRWQQGNVFSCSVMHEALHNHYTQKSLSLSPGGGGSGGGGSGGGGSTALGRRKAEDRIKETLWADGVKIDEKDFEHIKSSHEDYFAVEYGKGSGYYDVNKKMDSEDTALCVGAVVTNMFHWWVDQNRENIEKFKKQDPENNGVMKFEGVKEATVDELNHFYRDNRDNYADQSRFFDLIKKHFPNKALNPEELFELYFNGFYYGSSHRYIEDNEPAQNNLFSKVLENNKLLNPERSYGIDGFSNNVINALKSHKVLGLVYTTPLRYRHIISMWGADIDQDGKVKAIYVTDSDDREITFNDNSKRRIGMIRYDVLVDDNGNIRFTGKGATHKEEGAIYAGLYSLSRGDEVWEDYFKKYPEVQENL

SEQ ID NO: 657 - protein, 557 aa, synthetic construct
DKTHTCPPCPAPEAAGAPSVFLFPPKPKDTLMISRTPEVTCVVVDVSHEDPEVKFNWYVDGVEVHNAKTKPREEQQNSTYRVVSVLTVLHQDWLNGKEYKCKVSNKALKAPIEKTISKAKGQPREPQVYTLPPSRDELTKNQVSLTCLVKGFYPSDIAVEWESNGQPENNYKTTPPVLDSDGSFFLYSKLTVDKSRWQQGNVFSCSVMHEALHNHYTQKSLSLSPGGGGSGGGGSGGGGSTALGRRKAEDRIKETLWADGVKIDEKDFEHIKSSHEDYFAVEYGKGSGYYDVNKKMDSEDTALCVGAVVTNMFHWWVDQNRENIEKFKKQDPENNGVMKFEGVKEATVDELNHFYRDNRDNYADQSRFFDLIKKHFGNKALNPEELFELYFNGFYYGSSHRYIEDNEPAQNNLFSKVLENNKLLNPERSYGIDGFSNNVINALKSHKVLGLVYTTPLRSRHIISMWGADIDQDGKVKAIYVTDSDDREITFNDNSKRRIGMIRYDVLVDDNGNIRFTGKGATHKEEGAIYAGLYSLSRGDEVWEDYFKKYPEVQENL

SEQ ID NO: 658 - protein, 557 aa, synthetic construct
DKTHTCPPCPAPEAAGAPSVFLFPPKPKDTLMISRTPEVTCVVVDVSHEDPEVKFNWYVDGVEVHNAKTKPREEQQNSTYRVVSVLTVLHQDWLNGKEYKCKVSNKALKAPIEKTISKAKGQPREPQVYTLPPSRDELTKNQVSLTCLVKGFYPSDIAVEWESNGQPENNYKTTPPVLDSDGSFFLYSKLTVDKSRWQQGNVFSCSVMHEALHNHYTQKSLSLSPGGGGSGGGGSGGGGSTALGRRKAEDRIKETLWADGVKIDEKDFEHIDSSHEDYFAVEYGKGSGYYDVNKKMDSEDTALCVGAVVTNMFHWWVDQNRENIEKFKKQDPENNGVMKFEGVKEATVDELNHFYRDNRDNYADQSRFFDLIKKHFGNKALNPEELFELYFNGFYYGSSHRYIEDNEPAQNNLFSKVLENNKLLNPERSYGIDGFSNNVINALKSHKVLGLVYTTPLRYRHIISMWGADIDQDGKVKAIYVTDSDDREITFNDNSKRRIGMIRYDVLVDDNGNIRFTGKGATHKEEGAIYAGLYSLSRGDEVWEDYFKKYPEVQENL

SEQ ID NO: 659 - protein, 557 aa, synthetic construct
DKTHTCPPCPAPEAAGAPSVFLFPPKPKDTLMISRTPEVTCVVVDVSHEDPEVKFNWYVDGVEVHNAKTKPREEQQNSTYRVVSVLTVLHQDWLNGKEYKCKVSNKALKAPIEKTISKAKGQPREPQVYTLPPSRDELTKNQVSLTCLVKGFYPSDIAVEWESNGQPENNYKTTPPVLDSDGSFFLYSKLTVDKSRWQQGNVFSCSVMHEALHNHYTQKSLSLSPGGGGSGGGGSGGGGSTALGRRKAEDRIKETLWADGVKIDEKDFEHIKSSHEDYFAVEYGKGSGYYDVNKKMDSEDTALCVGAVVTNMFHWWVDQNRENIEKFKKQDPENNGVMKFEGVKEATVDELNHFYRDNRDNYADQSRFFDLIKKHFGNKALNPEELFELYFNGFYYGSSHRYIEDNEPAQNNLFSKVLENNKLLNPERSYGIDGFSNNVINALKSHKVLGLVYTTPLRYRHIISMWGADIDQDGKVKAIYVTDPDDREITFNDNSKRRIGMIRYDVLVDDNGNIRFTGKGATHKEEGAIYAGLYSLSRGDEVWEDYFKKYPEVQENL

SEQ ID NO: 660 - protein, 557 aa, synthetic construct
DKTHTCPPCPAPEAAGAPSVFLFPPKPKDTLMISRTPEVTCVVVDVSHEDPEVKFNWYVDGVEVHNAKTKPREEQQNSTYRVVSVLTVLHQDWLNGKEYKCKVSNKALKAPIEKTISKAKGQPREPQVYTLPPSRDELTKNQVSLTCLVKGFYPSDIAVEWESNGQPENNYKTTPPVLDSDGSFFLYSKLTVDKSRWQQGNVFSCSVMHEALHNHYTQKSLSLSPGGGGSGGGGSGGGGSTALGRRKAEDRIKETLWADGVKIDEKDFEHIKSSHEDYFAVEYGKGSGYYDVNKKMDSEDTALCVGAVVTNMFHWWVDQNRENIEKFKEQDPENNGVMKFEGVKEATVDELNHFYRDNRDNYADQSRFFDLIKKHFGNKALNPEELFELYFNGFYYGSSHRYIEDNEPAQNNLFSKVLENNKLLNPERSYGIDGFSNNVINALKSHKVLGLVYTTPLRYRHIISMWGADIDQDGKVKAIYVTDSDDREITFNDNSKRRIGMIRYDVLVDDNGNIRFTGKGATHKEEGAIYAGLYSLSRGDEVWEDYFKKYPEVQENL

SEQ ID NO: 661 - protein, 553 aa, synthetic construct
DKTHTCPPCPAPEAAGAPSVFLFPPKPKDTLMISRTPEVTCVVVDVSHEDPEVKFNWYVDGVEVHNAKTKPREEQQNSTYRVVSVLTVLHQDWLNGKEYKCKVSNKALKAPIEKTISKAKGQPREPQVYTLPPSRDELTKNQVSLTCLVKGFYPSDIAVEWESNGQPENNYKTTPPVLDSDGSFFLYSKLTVDKSRWQQGNVFSCSVMHEALHNHYTQKSLSLSPGGGGGSGGGGSTALGRRKAEDRIKETLWADGVKIDEKDFEHIKSSHEDYFAVEYGKGSGYYDVNKKMDSEDTALCVGAVVTNMFHWWVDQNRENIEKFKKQDPENNGVMKFEGVKEATVDELNEFYRDNRDNYADQSRFFDLIKKHFGNKALNPEELFELYFNGFYYGSSHRYIEDNEPAQNNLFSKVLENNKLLNPERSYGIDGFSNNVINALKSHKVLGLVYTTPLRYRHIISMWGADIDQDGKVKAIYVTDSDDREITFNDNSKRRIGMIRYDVLVDDNGNIRFTGKGATHKEEGAIYAGLYSLSRGDEVWEDYFKKYPEVQENL

SEQ ID NO: 662 - protein, 553 aa, synthetic construct
DKTHTCPPCPAPEAAGAPSVFLFPPKPKDTLMISRTPEVTCVVVDVSHEDPEVKFNWYVDGVEVHNAKTKPREEQQNSTYRVVSVLTVLHQDWLNGKEYKCKVSNKALKAPIEKTISKAKGQPREPQVYTLPPSRDELTKNQVSLTCLVKGFYPSDIAVEWESNGQPENNYKTTPPVLDSDGSFFLYSKLTVDKSRWQQGNVFSCSVMHEALHNHYTQKSLSLSPGGGGSKGGGSKTALGRRKAEDRIKETLWADGVKIDEKDFEHIKSSHEDYFAVEYGKGSGYYDVNKKMDSEDTALCVGAVVTNMFHWWVDQNRENIEKFKKQDPENNGVMKFEGVKEATVDELNEFYRDNRDNYADQSRFFDLIKKHFGNKALNPEELFELYFNGFYYGSSHRYIEDNEPAQNNLFSKVLENNKLLNPERSYGIDGFSNNVINALKSHKVLGLVYTTPLRYRHIISMWGADIDQDGKVKAIYVTDSDDREITFNDNSKRRIGMIRYDVLVDDNGNIRFTGKGATHKEEGAIYAGLYSLSRGDEVWEDYFKKYPEVQENL

SEQ ID NO: 663 - protein, 558 aa, synthetic construct
DKTHTCPPCPAPEAAGAPSVFLFPPKPKDTLMISRTPEVTCVVVDVSHEDPEVKFNWYVDGVEVHNAKTKPREEQQNSTYRVVSVLTVLHQDWLNGKEYKCKVSNKALKAPIEKTISKAKGQPREPQVYTLPPSRDELTKNQVSLTCLVKGFYPSDIAVEWESNGQPENNYKTTPPVLDSDGSFFLYSKLTVDKSRWQQGNVFSCSVMHEALHNHYTQKSLSLSPGGGGSKGGGSKGGGSKTALGRRKAEDRIKETLWADGVKIDEKDFEHIKSSHEDYFAVEYGKGSGYYDVNKKMDSEDTALCVGAVVTNMFHWWVDQNRENIEKFKKQDPENNGVMKFEGVKEATVDELNEFYRDNRDNYADQSRFFDLIKKHFGNKALNPEELFELYFNGFYYGSSHRYIEDNEPAQNNLFSKVLENNKLLNPERSYGIDGFSNNVINALKSHKVLGLVYTTPLRYRHIISMWGADIDQDGKVKAIYVTDSDDREITFNDNSKRRIGMIRYDVLVDDNGNIRFTGKGATHKEEGAIYAGLYSLSRGDEVWEDYFKKYPEVQENL

SEQ ID NO: 664 - protein, 563 aa, synthetic construct
DKTHTCPPCPAPEAAGAPSVFLFPPKPKDTLMISRTPEVTCVVVDVSHEDPEVKFNWYVDGVEVHNAKTKPREEQQNSTYRVVSVLTVLHQDWLNGKEYKCKVSNKALKAPIEKTISKAKGQPREPQVYTLPPSRDELTKNQVSLTCLVKGFYPSDIAVEWESNGQPENNYKTTPPVLDSDGSFFLYSKLTVDKSRWQQGNVFSCSVMHEALHNHYTQKSLSLSPGGGGSKGGGSKGGGSKGGGSKTALGRRKAEDRIKETLWADGVKIDEKDFEHIKSSHEDYFAVEYGKGSGYYDVNKKMDSEDTALCVGAVVTNMFHWWVDQNRENIEKFKKQDPENNGVMKFEGVKEATVDELNEFYRDNRDNYADQSRFFDLIKKHFGNKALNPEELFELYFNGFYYGSSHRYIEDNEPAQNNLFSKVLENNKLLNPERSYGIDGFSNNVINALKSHKVLGLVYTTPLRYRHIISMWGADIDQDGKVKAIYVTDSDDREITFNDNSKRRIGMIRYDVLVDDNGNIRFTGKGATHKEEGAIYAGLYSLSRGDEVWEDYFKKYPEVQENL

SEQ ID NO: 665 - protein, 553 aa, synthetic construct
DKTHTCPPCPAPEAAGAPSVFLFPPKPKDTLMISRTPEVTCVVVDVSHEDPEVKFNWYVDGVEVHNAKTKPREEQQNSTYRVVSVLTVLHQDWLNGKEYKCKVSNKALKAPIEKTISKAKGQPREPQVYTLPPSRDELTKNQVSLTCLVKGFYPSDIAVEWESNGQPENNYKTTPPVLDSDGSFFLYSKLTVDKSRWQQGNVFSCSVMHEALHNHYTQKSLSLSPGGSAGKGSAGKTALGRRKAEDRIKETLWADGVKIDEKDFEHIKSSHEDYFAVEYGKGSGYYDVNKKMDSEDTALCVGAVVTNMFHWWVDQNRENIEKFKKQDPENNGVMKFEGVKEATVDELNEFYRDNRDNYADQSRFFDLIKKHFGNKALNPEELFELYFNGFYYGSSHRYIEDNEPAQNNLFSKVLENNKLLNPERSYGIDGFSNNVINALKSHKVLGLVYTTPLRYRHIISMWGADIDQDGKVKAIYVTDSDDREITFNDNSKRRIGMIRYDVLVDDNGNIRFTGKGATHKEEGAIYAGLYSLSRGDEVWEDYFKKYPEVQENL

SEQ ID NO: 666 - protein, 558 aa, synthetic construct
DKTHTCPPCPAPEAAGAPSVFLFPPKPKDTLMISRTPEVTCVVVDVSHEDPEVKFNWYVDGVEVHNAKTKPREEQQNSTYRVVSVLTVLHQDWLNGKEYKCKVSNKALKAPIEKTISKAKGQPREPQVYTLPPSRDELTKNQVSLTCLVKGFYPSDIAVEWESNGQPENNYKTTPPVLDSDGSFFLYSKLTVDKSRWQQGNVFSCSVMHEALHNHYTQKSLSLSPGGSAGKGSAGKGSAGKTALGRRKAEDRIKETLWADGVKIDEKDFEHIKSSHEDYFAVEYGKGSGYYDVNKKMDSEDTALCVGAVVTNMFHWWVDQNRENIEKFKKQDPENNGVMKFEGVKEATVDELNEFYRDNRDNYADQSRFFDLIKKHFGNKALNPEELFELYFNGFYYGSSHRYIEDNEPAQNNLFSKVLENNKLLNPERSYGIDGFSNNVINALKSHKVLGLVYTTPLRYRHIISMWGADIDQDGKVKAIYVTDSDDREITFNDNSKRRIGMIRYDVLVDDNGNIRFTGKGATHKEEGAIYAGLYSLSRGDEVWEDYFKKYPEVQENL

SEQ ID NO: 667 - protein, 563 aa, synthetic construct
DKTHTCPPCPAPEAAGAPSVFLFPPKPKDTLMISRTPEVTCVVVDVSHEDPEVKFNWYVDGVEVHNAKTKPREEQQNSTYRVVSVLTVLHQDWLNGKEYKCKVSNKALKAPIEKTISKAKGQPREPQVYTLPPSRDELTKNQVSLTCLVKGFYPSDIAVEWESNGQPENNYKTTPPVLDSDGSFFLYSKLTVDKSRWQQGNVFSCSVMHEALHNHYTQKSLSLSPGGSAGKGSAGKGSAGKGSAGKTALGRRKAEDRIKETLWADGVKIDEKDFEHIKSSHEDYFAVEYGKGSGYYDVNKKMDSEDTALCVGAVVTNMFHWWVDQNRENIEKFKKQDPENNGVMKFEGVKEATVDELNEFYRDNRDNYADQSRFFDLIKKHFGNKALNPEELFELYFNGFYYGSSHRYIEDNEPAQNNLFSKVLENNKLLNPERSYGIDGFSNNVINALKSHKVLGLVYTTPLRYRHIISMWGADIDQDGKVKAIYVTDSDDREITFNDNSKRRIGMIRYDVLVDDNGNIRFTGKGATHKEEGAIYAGLYSLSRGDEVWEDYFKKYPEVQENL

SEQ ID NO: 668 - protein, 553 aa, synthetic construct
DKTHTCPPCPAPEAAGAPSVFLFPPKPKDTLMISRTPEVTCVVVDVSHEDPEVKFNWYVDGVEVHNAKTKPREEQQNSTYRVVSVLTVLHQDWLNGKEYKCKVSNKALKAPIEKTISKAKGQPREPQVYTLPPSRDELTKNQVSLTCLVKGFYPSDIAVEWESNGQPENNYKTTPPVLDSDGSFFLYSKLTVDKSRWQQGNVFSCSVMHEALHNHYTQKSLSLSPGGSSAPGSSAPTALGRRKAEDRIKETLWADGVKIDEKDFEHIKSSHEDYFAVEYGKGSGYYDVNKKMDSEDTALCVGAVVTNMFHWWVDQNRENIEKFKKQDPENNGVMKFEGVKEATVDELNEFYRDNRDNYADQSRFFDLIKKHFGNKALNPEELFELYFNGFYYGSSHRYIEDNEPAQNNLFSKVLENNKLLNPERSYGIDGFSNNVINALKSHKVLGLVYTTPLRYRHIISMWGADIDQDGKVKAIYVTDSDDREITFNDNSKRRIGMIRYDVLVDDNGNIRFTGKGATHKEEGAIYAGLYSLSRGDEVWEDYFKKYPEVQENL

SEQ ID NO: 669 - protein, 558 aa, synthetic construct
DKTHTCPPCPAPEAAGAPSVFLFPPKPKDTLMISRTPEVTCVVVDVSHEDPEVKFNWYVDGVEVHNAKTKPREEQQNSTYRVVSVLTVLHQDWLNGKEYKCKVSNKALKAPIEKTISKAKGQPREPQVYTLPPSRDELTKNQVSLTCLVKGFYPSDIAVEWESNGQPENNYKTTPPVLDSDGSFFLYSKLTVDKSRWQQGNVFSCSVMHEALHNHYTQKSLSLSPGGSSAPGSSAPGSSAPTALGRRKAEDRIKETLWADGVKIDEKDFEHIKSSHEDYFAVEYGKGSGYYDVNKKMDSEDTALCVGAVVTNMFHWWVDQNRENIEKFKKQDPENNGVMKFEGVKEATVDELNEFYRDNRDNYADQSRFFDLIKKHFGNKALNPEELFELYFNGFYYGSSHRYIEDNEPAQNNLFSKVLENNKLLNPERSYGIDGFSNNVINALKSHKVLGLVYTTPLRYRHIISMWGADIDQDGKVKAIYVTDSDDREITFNDNSKRRIGMIRYDVLVDDNGNIRFTGKGATHKEEGAIYAGLYSLSRGDEVWEDYFKKYPEVQENL

SEQ ID NO: 670 - protein, 557 aa, synthetic construct
DKTHTCPPCPAPEAAGAPSVFLFPPKPKDTLMISRTPEVTCVVVDVSHEDPEVKFNWYVDGVEVHNAKTKPREEQQNSTYRVVSVLTVLHQDWLNGKEYKCKVSNKALKAPIEKTISKAKGQPREPQVYTLPPSRDELTKNQVSLWCLVKGFYPSDIAVEWESNGQPENNYKTTPPVLDSDGSFFLYSKLTVDKSRWQQGNVFSCSVMHEALHNHYTQKSLSLSPGGGGSGGGGSGGGGSTALGRRKAEDRIKETLWADGVKIDEKDFEHIKSSHEDYFAVEYGKGSGYYDVNKKMDSEDTALCVGAVVTNMFHWWVDQNRENIEKFKKQDPENNGVMKFEGVKEATVDELNEFYRDNRDNYADQSRFFDLIKKHFGNKALNPEELFELYFNGFYYGSSHRYIEDNEPAQNNLFSKVLENNKLLNPERSYGIDGFSNNVINALKSHKVLGLVYTTPLRYRHIISMWGADIDQDGKVKAIYVTDSDDREITFNDNSKRRIGMIRYDVLVDDNGNIRFTGKGATHKEEGAIYAGLYSLSRGDEVWEDYFKKYPEVQENL

SEQ ID NO: 671 - protein, 557 aa, synthetic construct
DKTHTCPPCPAPEAAGAPSVFLFPPKPKDTLMISRTPEVTCVVVDVSHEDPEVKFNWYVDGVEVHNAKTKPREEQQNSTYRVVSVLTVLHQDWLNGKEYKCKVSNKALKAPIEKTISKAKGQPREPQVYTLPPCRDELTKNQVSLWCLVKGFYPSDIAVEWESNGQPENNYKTTPPVLDSDGSFFLYSKLTVDKSRWQQGNVFSCSVMHEALHNHYTQKSLSLSPGGGGSGGGGSGGGGSTALGRRKAEDRIKETLWADGVKIDEKDFEHIKSSHEDYFAVEYGKGSGYYDVNKKMDSEDTALCVGAVVTNMFHWWVDQNRENIEKFKKQDPENNGVMKFEGVKEATVDELNEFYRDNRDNYADQSRFFDLIKKHFGNKALNPEELFELYFNGFYYGSSHRYIEDNEPAQNNLFSKVLENNKLLNPERSYGIDGFSNNVINALKSHKVLGLVYTTPLRYRHIISMWGADIDQDGKVKAIYVTDSDDREITFNDNSKRRIGMIRYDVLVDDNGNIRFTGKGATHKEEGAIYAGLYSLSRGDEVWEDYFKKYPEVQENL

SEQ ID NO: 672 - protein, 557 aa, synthetic construct
DKTHTCPPCPAPEAAGAPSVFLFPPKPKDTLMISRTPEVTCVVVDVSHEDPEVKFNWYVDGVEVHNAKTKPREEQQNSTYRVVSVLTVLHQDWLNGKEYKCKVSNKALKAPIEKTISKAKGQPREPQVYTLPPSRDELTKNQVSLTCLVKGFYPSDIAVEWESNGQPENNYKTTPPVLDSDGSFFLYSKLTVDKSRWQQGNVFSCSVLHEALHSHYTQKSLSLSPGGGGSGGGGSGGGGSTALGRRKAEDRIKETLWADGVKIDEKDFEHIKSSHEDYFAVEYGKGSGYYDVNKKMDSEDTALCVGAVVTNMFHWWVDQNRENIEKFKKQDPENNGVMKFEGVKEATVDELNEFYRDNRDNYADQSRFFDLIKKHFGNKALNPEELFELYFNGFYYGSSHRYIEDNEPAQNNLFSKVLENNKLLNPERSYGIDGFSNNVINALKSHKVLGLVYTTPLRYRHIISMWGADIDQDGKVKAIYVTDSDDREITFNDNSKRRIGMIRYDVLVDDNGNIRFTGKGATHKEEGAIYAGLYSLSRGDEVWEDYFKKYPEVQENL

SEQ ID NO: 673 - protein, 557 aa, synthetic construct
DKTHTCPPCPAPEAAGAPSVFLFPPKPKDTLMISRTPEVTCVVVDVSHEDPEVKFNWYVDGVEVHNAKTKPREEQQNSTYRVVSVLTVDHHDWLNGKEYKCKVSNKALKAPIEKTISKAKGQPREPQVYTLPPSRDELTKNQVSLTCLVKGFYPSDIAVEWESNGQPENNYKTTPPVLDSDGSFFLYSKLTVDKSRWQQGNVFSCSVMHEALHSHYTQKSLSLSPGGGGSGGGGSGGGGSTALGRRKAEDRIKETLWADGVKIDEKDFEHIKSSHEDYFAVEYGKGSGYYDVNKKMDSEDTALCVGAVVTNMFHWWVDQNRENIEKFKKQDPENNGVMKFEGVKEATVDELNEFYRDNRDNYADQSRFFDLIKKHFGNKALNPEELFELYFNGFYYGSSHRYIEDNEPAQNNLFSKVLENNKLLNPERSYGIDGFSNNVINALKSHKVLGLVYTTPLRYRHIISMWGADIDQDGKVKAIYVTDSDDREITFNDNSKRRIGMIRYDVLVDDNGNIRFTGKGATHKEEGAIYAGLYSLSRGDEVWEDYFKKYPEVQENL

SEQ ID NO: 674 - protein, 557 aa, synthetic construct
DKTHTCPPCPAPEAAGAPSVFLFPPKPKDTLMISRTPEVTCVVVDVSHEDPEVKFNWYVDGVEVHNAKTKPREEQQNSTYRVVSVLTVLHQDWLNGKEYKCKVSNKALKAPIEKTISKAKGQPREPQVYTLPPSRDELTKNQVSLTCLVKGFYPSDIAVEWESNGQPENNYKTTPPVLDSDGSFFLYSKLTVDKSRWQQGNVFSCSVMHEALHNHYTQKSLSLSPGGGGSGGGGSGGGGSTALGRRKAEDRIKETLWADGVKIDEKDFEHIKSSHEDYFAVEYGKGSGYYDVNKKMDSEDSALCVGAVVTNMFHWWVDQNRENIEKFKKQDPENNGVMKFEGVKEATVDELNEFYRDNRDNYADQSRFFDLIKKHFGNKALNPEELFELYFNGFYYGSSHRYIEDNEPAQNNLFSKVLENNKLLNPERSYGIDGFSNNVINALKSHKVLGLVYTTPLRYRHIISMWGADIDQDGKVKAIYVTDSDDREITFNDNSKRRIGMIRYDVLVDDNGNIRFTGKGATHKEEGAIYAGLYSLSRGDEVWEDYFKKYPEVQENL

SEQ ID NO: 675 - protein, 557 aa, synthetic construct
DKTHTCPPCPAPEAAGAPSVFLFPPKPKDTLMISRTPEVTCVVVDVSHEDPEVKFNWYVDGVEVHNAKTKPREEQQNSTYRVVSVLTVLHQDWLNGKEYKCKVSNKALKAPIEKTISKAKGQPREPQVYTLPPSRDELTKNQVSLTCLVKGFYPSDIAVEWESNGQPENNYKTTPPVLDSDGSFFLYSKLTVDKSRWQQGNVFSCSVMHEALHNHYTQKSLSLSPGGGGSGGGGSGGGGSTALGRRKAEDRIKETLWADGVKIDEKDFEHIKSSHEDYFAVEYGKGSGYYDVNKKMDSEDTALCVGAVVTNMFHWWVDQNRENIEKFKKQDPENNGVMKFEGVKEATVDELNEFYRDNRDNYADQSRFFDLIKSHFGNKALNPEELFELYFNGFYYGSSHRYIEDNEPAQNNLFSKVLENNKLLNPERSYGIDGFSNNVINALKSHKVLGLVYTTPLRYRHIISMWGADIDQDGKVKAIYVTDSDDREITFNDNSARRIGMIRYDVLVDDNGNIRFTGKGATHKEEGAIYAGLYSLSRGDEVWEDYFKKYPEVQENL

SEQ ID NO: 676 - protein, 557 aa, synthetic construct
DKTHTCPPCPAPEAAGAPSVFLFPPKPKDTLMISRTPEVTCVVVDVSHEDPEVKFNWYVDGVEVHNAKTKPREEQQNSTYRVVSVLTVLHQDWLNGKEYKCKVSNKALKAPIEKTISKAKGQPREPQVYTLPPSRDELTKNQVSLTCLVKGFYPSDIAVEWESNGQPENNYKTTPPVLDSDGSFFLYSKLTVDKSRWQQGNVFSCSVMHEALHNHYTQKSLSLSPGGGGSGGGGSGGGGSTALGRRKAEDRIKETLWADGVKIDEKDFEHIKSSHEDYFAVEYGKGSGYYDVNKKMDSEDTALCVGAVVTNMFHWWVDQNRENIEKFKKQDPENNGVMKFEGVKEATVDELNEFYRDNRDNYADQSRFFDLIKKHFGNKALNPEELFELYFNGFYYGSSQRYIEDNEPAQNNLFSKVLENNKLLNPERSYGIDGFSNNVINALKSHKVLGLVYTTPLEYRHIISMWGADIDQDGKVKAIYVTDSDDREITFNDNSKRRIGMIRYDVLVDDNGNIRFTGKGATHKEEGAIYAGLYSLSRGDEVWEDYFKKYPEVQENL

SEQ ID NO: 677 - protein, 557 aa, synthetic construct
DKTHTCPPCPAPEAAGAPSVFLFPPKPKDTLMISRTPEVTCVVVDVSHEDPEVKFNWYVDGVEVHNAKTKPREEQQNSTYRVVSVLTVLHQDWLNGKEYKCKVSNKALKAPIEKTISKAKGQPREPQVYTLPPSRDELTKNQVSLTCLVKGFYPSDIAVEWESNGQPENNYKTTPPVLDSDGSFFLYSKLTVDKSRWQQGNVFSCSVMHEALHNHYTQKSLSLSPGGGGSGGGGSGGGGSTALGRRKAEDRIKETLWADGVKIDEKDFEHIKSSHEDYFAVEYGKGSGYYDVNKKMDSEDTALCVGAVVTNMFHWWVDQNRENIEKFKKQDPENNGVMKFEGVKEATVDELNEFYRDNRDNYADQSRFFDLIKSHFGNKALNPEELFELYFNGFYYGSSQRYIEDNEPAQNNLFSKVLENNKLLNPERSYGIDGFSNNVINALKSHKVLGLVYTTPLEYRHIISMWGADIDQDGKVKAIYVTDSDDREITFNDNSARRIGMIRYDVLVDDNGNIRFTGKGATHKEEGAIYAGLYSLSRGDEVWEDYFKKYPEVQENL

SEQ ID NO: 678 - protein, 557 aa, synthetic construct
DKTHTCPPCPAPEAAGAPSVFLFPPKPKDTLMISRTPEVTCVVVDVSHEDPEVKFNWYVDGVEVHNAKTKPREEQQNSTYRVVSVLTVLHQDWLNGKEYKCKVSNKALKAPIEKTISKAKGQPREPQVYTLPPSRDELTKNQVSLTCLVKGFYPSDIAVEWESNGQPENNYKTTPPVLDSDGSFFLYSKLTVDKSRWQQGNVFSCSVMHEALHNHYTQKSLSLSPGGGGSGGGGSGGGGSTALGRRKAEDRIKETLWADGVKIDEKDFEHIKSSHEDYFAVEYGKGSGYYDVNKKMDSEDTALCVGAVVTNMFHWWVDQNRENIEKFKKQDPENNGVMKFEGVKEATVDELNEFYRDNRDNYADQSRFFDLIKKHFGNKALNPEELFELYFNGFYYGSSHRYIEDNEPAQNNLFSKVLENNKLLNPERSYGIDGFSNNVINALKSHKVLGLVYTTPLRYRHIISMWGADIDQDGKVKAIYVTDSDDREITFNDNSKRRIGMIRYDVLVDKNGNIRFTGKGATHKEEGAIYAGLYSLSRGDEVWEDYFKKYPEVQENL

SEQ ID NO: 679 - protein, 557 aa, synthetic construct
DKTHTCPPCPAPEAAGAPSVFLFPPKPKDTLMISRTPEVTCVVVDVSHEDPEVKFNWYVDGVEVHNAKTKPREEQQNSTYRVVSVLTVLHQDWLNGKEYKCKVSNKALKAPIEKTISKAKGQPREPQVYTLPPSRDELTKNQVSLTCLVKGFYPSDIAVEWESNGQPENNYKTTPPVLDSDGSFFLYSKLTVDKSRWQQGNVFSCSVMHEALHNHYTQKSLSLSPGGGGSGGGGSGGGGSTALGRRKAEDRIKETLWADGVKIDEKDFEHIKSSHEDYFAVEYGKGSGYYDVNKKMDSEDTALCVGAVVTNMFHWWVDQNRENIEKFKKQDPENNGVMKFEGVKEATVDELNEFYRDNRDNYADQSRFFDLIKKHFGNKALNPEELFELYFNGFYYGSSHRYIEDNEPAQGNLFSKVLENNKLLNPERSYGIDGFSNNVINALKSHKVLGLVYTTPLRYRHIISMWGADIDQDGKVKAIYVTDSDDREITFNDNSKRRIGMIRYDVLVDDNGNIRFTGKGATHKEEGAIYAGLYSLSRGDEVWEDYFKKYPEVQENL

SEQ ID NO: 680 - protein, 557 aa, synthetic construct
DKTHTCPPCPAPEAAGAPSVFLFPPKPKDTLMISRTPEVTCVVVDVSHEDPEVKFNWYVDGVEVHNAKTKPREEQQNSTYRVVSVLTVLHQDWLNGKEYKCKVSNKALKAPIEKTISKAKGQPREPQVYTLPPSRDELTKNQVSLTCLVKGFYPSDIAVEWESNGQPENNYKTTPPVLDSDGSFFLYSKLTVDKSRWQQGNVFSCSVMHEALHNHYTQKSLSLSPGGGGSGGGGSGGGGSTALGRRKAEDRIKETLWADGVKIDEKDFEHIKSSHEDYFAVEYGKGSGYYDVNKKMDSEDTALCVGAVVTNMFHWWVDQNRENIEKFKKQDPENNGVMKFEGVKEATVDELNEFYRDNRDNYADQSRFFDLIKKHFGNKALNPEELFELYFNGFYYGSSHRYIEDNEPAQNNLFSKVLENNKLLNPERSYGRDGFSNNVINALKSHKVLGLVYTTPLRYRHIISMWGADIDQDGKVKAIYVTDSDDREITFNDNSKRRIGMIRYDVLVDDNGNIRFTGKGATHKEEGAIYAGLYSLSRGDEVWEDYFKKYPEVQENL

SEQ ID NO: 681 - protein, 557 aa, synthetic construct
DKTHTCPPCPAPEAAGAPSVFLFPPKPKDTLMISRTPEVTCVVVDVSHEDPEVKFNWYVDGVEVHNAKTKPREEQQNSTYRVVSVLTVLHQDWLNGKEYKCKVSNKALKAPIEKTISKAKGQPREPQVYTLPPSRDELTKNQVSLTCLVKGFYPSDIAVEWESNGQPENNYKTTPPVLDSDGSFFLYSKLTVDKSRWQQGNVFSCSVMHEALHNHYTQKSLSLSPGGGGSGGGGSGGGGSTALGRRKAEDRIKETLWADGVKIDEKDFEHIKSSHEDYFAVEYGKGSGYYDVNKKMDSEDTALCVGAVVTNMFHWWVDQNRENIEKFKKQDPENNGVMKFEGVKEATVDELNEFYRDNRDNYADQSRFFDLIKKHFGNKALNPEELFELYFNGFYYGSSHRYIEDNEPAQNNLFSKVLENNKLLNPERSYGIDGFSNNVINALKSHKVLGLVYTTPLRYRHIISMWGADIDQDGKVKAIYVTDSDDREITFNDNSKRRIGMIRYDVLVDDNGNIRFTGKGATHKEEGAIYAGLYSLSRGDKVWEDYFKKYPEVQENL

SEQ ID NO: 682 - protein, 557 aa, synthetic construct
DKTHTCPPCPAPEAAGAPSVFLFPPKPKDTLMISRTPEVTCVVVDVSHEDPEVKFNWYVDGVEVHNAKTKPREEQQNSTYRVVSVLTVLHQDWLNGKEYKCKVSNKALKAPIEKTISKAKGQPREPQVYTLPPSRDELTKNQVSLTCLVKGFYPSDIAVEWESNGQPENNYKTTPPVLDSDGSFFLYSKLTVDKSRWQQGNVFSCSVMHEALHNHYTQKSLSLSPGGGGSGGGGSGGGGSTALGRRKAEDRIKETLWADGVKIDEKDFEHIKSSHEDYFAVEYGKGSGYYDVNKKMDSEDTALCVGAVVTNMFHWWVDQNRENIEKFKKQDPENNGVMKFEGVKEATVDELNEFYRDNRDNYADQSRFFDLIKKHFGNKALNPEELFELYFNGFYYGSSHRYIEDNEPAQNNLFSKVLENNKLLNPERSYGIDGFSNNVINALKSHKVLGLVYTTPLRYRHIISMWGADIDQDGKVKAIYVTDSDDREITFNDNSKRRIGMIRYDVLVDDNGNIRFTGKGATHKEEGAIYAGLYSLSRGDEVWKDYFKKYPEVQENL

SEQ ID NO: 683 - protein, 557 aa, synthetic construct
DKTHTCPPCPAPEAAGAPSVFLFPPKPKDTLMISRTPEVTCVVVDVSHEDPEVKFNWYVDGVEVHNAKTKPREEQQNSTYRVVSVLTVLHQDWLNGKEYKCKVSNKALKAPIEKTISKAKGQPREPQVYTLPPSRDELTKNQVSLTCLVKGFYPSDIAVEWESNGQPENNYKTTPPVLDSDGSFFLYSKLTVDKSRWQQGNVFSCSVMHEALHNHYTQKSLSLSPGGGGSGGGGSGGGGSTALGRRKAEDRIKETLWADGVKIDEKDFEHIKSSHEDYFAVEYGKGSGYYDVNKKMDSEDTALCVGAVVTNMFHWWVDQNRENIEKFKKQDPENNGVMKFEGVKEATVDELNEFYRDNRDNYADQSRFFDLIKKHFGNKALNPEELFELYFNGFYYGSSHRYIEDNEPAQNNLFSKVLENNKLLNPERSYGIDGFSNNVINALKSHKVLGLVYTTPLRYRHIISMWGADIDQDGKVKAIYVTDSDDREITFNDNSKRRIGMIRYDVLVDDNGNIRFTGKGATHKNEGAIYAGLYSLSRGDEVWEDYFKKYPEVQENL

SEQ ID NO: 684 - protein, 557 aa, synthetic construct
DKTHTCPPCPAPEAAGAPSVFLFPPKPKDTLMISRTPEVTCVVVDVSHEDPEVKFNWYVDGVEVHNAKTKPREEQQNSTYRVVSVLTVLHQDWLNGKEYKCKVSNKALKAPIEKTISKAKGQPREPQVYTLPPSRDELTKNQVSLTCLVKGFYPSDIAVEWESNGQPENNYKTTPPVLDSDGSFFLYSKLTVDKSRWQQGNVFSCSVMHEALHNHYTQKSLSLSPGGGGSGGGGSGGGGSTALGRRKAEDRIKETLWADGVKIDEKDFEHIKSSHEDYFAVEYGKGSGYYDVNKKMDSEDSALCVGAVVTNMFHWWVDQNRENIEKFKKQDPENNGVMKFEGVKEATVDELNEFYRDNRDNYADQSRFFDLIKSHFGNKALNPEELFELYFNGFYYGSSHRYIEDNEPAQNNLFSKVLENNKLLNPERSYGIDGFSNNVINALKSHKVLGLVYTTPLRYRHIISMWGADIDQDGKVKAIYVTDSDDREITFNDNSARRIGMIRYDVLVDDNGNIRFTGKGATHKEEGAIYAGLYSLSRGDEVWEDYFKKYPEVQENL

SEQ ID NO: 685 - protein, 557 aa, synthetic construct
DKTHTCPPCPAPEAAGAPSVFLFPPKPKDTLMISRTPEVTCVVVDVSHEDPEVKFNWYVDGVEVHNAKTKPREEQQNSTYRVVSVLTVLHQDWLNGKEYKCKVSNKALKAPIEKTISKAKGQPREPQVYTLPPSRDELTKNQVSLTCLVKGFYPSDIAVEWESNGQPENNYKTTPPVLDSDGSFFLYSKLTVDKSRWQQGNVFSCSVMHEALHNHYTQKSLSLSPGGGGSGGGGSGGGGSTALGRRKAEDRIKETLWADGVKIDEKDFEHIKSSHEDYFAVEYGKGSGYYDVNKKMDSEDSALCVGAVVTNMFHWWVDQNRENIEKFKKQDPENNGVMKFEGVKEATVDELNEFYRDNRDNYADQSRFFDLIKKHFGNKALNPEELFELYFNGFYYGSSQRYIEDNEPAQNNLFSKVLENNKLLNPERSYGIDGFSNNVINALKSHKVLGLVYTTPLEYRHIISMWGADIDQDGKVKAIYVTDSDDREITFNDNSKRRIGMIRYDVLVDDNGNIRFTGKGATHKEEGAIYAGLYSLSRGDEVWEDYFKKYPEVQENL

SEQ ID NO: 686 - protein, 557 aa, synthetic construct
DKTHTCPPCPAPEAAGAPSVFLFPPKPKDTLMISRTPEVTCVVVDVSHEDPEVKFNWYVDGVEVHNAKTKPREEQQNSTYRVVSVLTVLHQDWLNGKEYKCKVSNKALKAPIEKTISKAKGQPREPQVYTLPPSRDELTKNQVSLTCLVKGFYPSDIAVEWESNGQPENNYKTTPPVLDSDGSFFLYSKLTVDKSRWQQGNVFSCSVMHEALHNHYTQKSLSLSPGGGGSGGGGSGGGGSTALGRRKAEDRIKETLWADGVKIDEKDFEHIKSSHEDYFAVEYGKGSGYYDVNKKMDSEDSALCVGAVVTNMFHWWVDQNRENIEKFKKQDPENNGVMKFEGVKEATVDELNEFYRDNRDNYADQSRFFDLIKSHFGNKALNPEELFELYFNGFYYGSSQRYIEDNEPAQNNLFSKVLENNKLLNPERSYGIDGFSNNVINALKSHKVLGLVYTTPLEYRHIISMWGADIDQDGKVKAIYVTDSDDREITFNDNSARRIGMIRYDVLVDDNGNIRFTGKGATHKEEGAIYAGLYSLSRGDEVWEDYFKKYPEVQENL

SEQ ID NO: 687 - protein, 557 aa, synthetic construct
DKTHTCPPCPAPEAAGAPSVFLFPPKPKDTLMISRTPEVTCVVVDVSHEDPEVKFNWYVDGVEVHNAKTKPREEQQNSTYRVVSVLTVLHQDWLNGKEYKCKVSNKALKAPIEKTISKAKGQPREPQVYTLPPSRDELTKNQVSLTCLVKGFYPSDIAVEWESNGQPENNYKTTPPVLDSDGSFFLYSKLTVDKSRWQQGNVFSCSVMHEALHNHYTQKSLSLSPGGGGSGGGGSGGGGSTALGRRKAEDRIKETLWADGVKIDEKDFEHIKSSHEDYFAVEYGKGSGYYDVNKKMDSEDTALCVGAVVTNMFHWWVDQNRENIEKFKKQDPENNGVMKFEGVKEATVDELNEFYRDNRDNYADQSRFFDLIKKHFGNKALNPEELFELYFNGFYYGSSHRYIEDNEPAQNNLFSKVLENNKLLNPERSYGIDGFSNNVINALKSHKVLGLVYTTPLRYRHIISMWGADIDQDGKVKAIYVTDSDDREITFNDNSKRRIGMIRYDVLVDDNGNIRFTGKGATHKEEGAIYAGLYSLSRGDKVWKDYFKKYPEVQENL

SEQ ID NO: 688 - protein, 557 aa, synthetic construct
DKTHTCPPCPAPEAAGAPSVFLFPPKPKDTLMISRTPEVTCVVVDVSHEDPEVKFNWYVDGVEVHNAKTKPREEQQNSTYRVVSVLTVLHQDWLNGKEYKCKVSNKALKAPIEKTISKAKGQPREPQVYTLPPSRDELTKNQVSLTCLVKGFYPSDIAVEWESNGQPENNYKTTPPVLDSDGSFFLYSKLTVDKSRWQQGNVFSCSVMHEALHNHYTQKSLSLSPGGGGSGGGGSGGGGSTALGRRKAEDRIKETLWADGVKIDEKDFEHIKSSHEDYFAVEYGKGSGYYDVNKKMDSEDTALCVGAVVTNMFHWWVDQNRENIEKFKKQDPENNGVMKFEGVKEATVDELNEFYRDNRDNYADQSRFFDLIKKHFGNKALNPEELFELYFNGFYYGSSHRYIEDNEPAQNNLFSKVLENNKLLNPERSYGIDGFSNNVINALKSHKVLGLVYTTPLRYRHIISMWGADIDQDGKVKAIYVTDSDDREITFNDNSKRRIGMIRYDVLVDKNGNIRFTGKGATHKNEGAIYAGLYSLSRGDEVWEDYFKKYPEVQENL

SEQ ID NO: 689 - protein, 557 aa, synthetic construct
DKTHTCPPCPAPEAAGAPSVFLFPPKPKDTLMISRTPEVTCVVVDVSHEDPEVKFNWYVDGVEVHNAKTKPREEQQNSTYRVVSVLTVLHQDWLNGKEYKCKVSNKALKAPIEKTISKAKGQPREPQVYTLPPSRDELTKNQVSLTCLVKGFYPSDIAVEWESNGQPENNYKTTPPVLDSDGSFFLYSKLTVDKSRWQQGNVFSCSVMHEALHNHYTQKSLSLSPGGGGSGGGGSGGGGSTALGRRKAEDRIKETLWADGVKIDEKDFEHIKSSHEDYFAVEYGKGSGYYDVNKKMDSEDTALCVGAVVTNMFHWWVDQNRENIEKFKKQDPENNGVMKFEGVKEATVDELNEFYRDNRDNYADQSRFFDLIKKHFGNKALNPEELFELYFNGFYYGSSHRYIEDNEPAQNNLFSKVLENNKLLNPERSYGRDGFSNNVINALKSHKVLGLVYTTPLRYRHIISMWGADIDQDGKVKAIYVTDSDDREITFNDNSKRRIGMIRYDVLVDKNGNIRFTGKGATHKNEGAIYAGLYSLSRGDKVWKDYFKKYPEVQENL

SEQ ID NO: 690 - protein, 557 aa, synthetic construct
DKTHTCPPCPAPEAAGAPSVFLFPPKPKDTLMISRTPEVTCVVVDVSHEDPEVKFNWYVDGVEVHNAKTKPREEQQNSTYRVVSVLTVLHQDWLNGKEYKCKVSNKALKAPIEKTISKAKGQPREPQVYTLPPSRDELTKNQVSLTCLVKGFYPSDIAVEWESNGQPENNYKTTPPVLDSDGSFFLYSKLTVDKSRWQQGNVFSCSVMHEALHNHYTQKSLSLSPGGGGSGGGGSGGGGSTALGRRKAEDRIKETLWADGVKIDEKDFEHIKSSHEDYFAVEYGKGSGYYDVNKKMDSEDTALSVGAVVTNMFHWWVDQNRENIEKFKKQDPENNGVMKFEGVKEATVDELNEFYRDNRDNYADQSRFFDLIKKHFGNKALNPEELFELYFNGFYYGSSHRYIEDNEPAQNNLFSKVLENNKLLNPERSYGIDGFSNNVINALKSHKVLGLVYTTPLRYRHIISMWGADIDQDGKVKAIYVTDSDDREITFNDNSKRRIGMIRYDVLVDDNGNIRFTGKGATHKEEGAIYAGLYSLSRGDEVWEDYFKKYPEVQENL

SEQ ID NO: 691 - protein, 557 aa, synthetic construct
DKTHTCPPCPAPEAAGAPSVFLFPPKPKDTLMISRTPEVTCVVVDVSHEDPEVKFNWYVDGVEVHNAKTKPREEQQNSTYRVVSVLTVLHQDWLNGKEYKCKVSNKALKAPIEKTISKAKGQPREPQVYTLPPSRDELTKNQVSLTCLVKGFYPSDIAVEWESNGQPENNYKTTPPVLDSDGSFFLYSKLTVDKSRWQQGNVFSCSVMHEALHNHYTQKSLSLSPGGGGSGGGGSGGGGSTALGRRKAEDRIKETLWADGVKIDEKDFEHIKSSHEDYFAVEYGKGSGYYDVNKKMDSEDTALCVGAVVTNMFHWWVDQNRENIEKFKKQNPENNGVMKFEGVKEATVDELNEFYRDNRDNYADQSRFFDLIKKHFGNKALNPEELFELYFNGFYYGSSHRYIEDNEPAQNNLFSKVLENNKLLNPERSYGIDGFSNNVINALKSHKVLGLVYTTPLRYRHIISMWGADIDQDGKVKAIYVTDSDDREITFNDNSKRRIGMIRYDVLVDDNGNIRFTGKGATHKEEGAIYAGLYSLSRGDEVWEDYFKKYPEVQENL

SEQ ID NO: 692 - protein, 557 aa, synthetic construct
DKTHTCPPCPAPEAAGAPSVFLFPPKPKDTLMISRTPEVTCVVVDVSHEDPEVKFNWYVDGVEVHNAKTKPREEQQNSTYRVVSVLTVLHQDWLNGKEYKCKVSNKALKAPIEKTISKAKGQPREPQVYTLPPSRDELTKNQVSLTCLVKGFYPSDIAVEWESNGQPENNYKTTPPVLDSDGSFFLYSKLTVDKSRWQQGNVFSCSVMHEALHNHYTQKSLSLSPGGGGSGGGGSGGGGSTALGRRKAEDRIKETLWADGVKIDEKDFEHIKSSHEDYFAVEYGKGSGYYDVNKKMDSEDTALCVGAVVTNMFHWWVDQNRENIEKFKKQDPENNGVMKFEGVKEATVDELNEFYRDNRDNYADQSRFFDLIKKHFGNKALNPEELFELYFNGFYYGSSHRYIEDNEPAQNNLFSKVLENNKLLNPERSYGIDGFSNNVINALKSHKVLGLVYTTPLRYRHIISMWGADIDQDGKVKAIYVTDSDDREITFNDNSKRRIGMIRYDVLVDDEGNIRFTGKGATHKEEGAIYAGLYSLSRGDEVWEDYFKKYPEVQENL

SEQ ID NO: 693 - protein, 557 aa, synthetic construct
DKTHTCPPCPAPEAAGAPSVFLFPPKPKDTLMISRTPEVTCVVVDVSHEDPEVKFNWYVDGVEVHNAKTKPREEQQNSTYRVVSVLTVLHQDWLNGKEYKCKVSNKALKAPIEKTISKAKGQPREPQVYTLPPSRDELTKNQVSLTCLVKGFYPSDIAVEWESNGQPENNYKTTPPVLDSDGSFFLYSKLTVDKSRWQQGNVFSCSVMHEALHNHYTQKSLSLSPGGGGSGGGGSGGGGSTALGRRKAEDRIKETLWADGVKIDEKDFEHIKSSHEDYFAVEYGKGSGYYDVNKKMDSEDTALCVGAVVTNMFHWWVDQNRENIEKFKKQDPENNGVMKFEGVKEATVDELNEFYRDNRDNYADQSRFFDLIKKDFGNKALNPEELFELYFNGFYYGSSHRYIEDNEPAQNNLFSKVLENNKLLNPERSYGIDGFSNNVINALKSHKVLGLVYTTPLRYRHIISMWGADIDQDGKVKAIYVTDSDDREITFNDNSKRRIGMIRYDVLVDDNGNIRFTGKGATHKEEGAIYAGLYSLSRGDEVWEDYFKKYPEVQENL

SEQ ID NO: 694 - protein, 557 aa, synthetic construct
DKTHTCPPCPAPEAAGAPSVFLFPPKPKDTLMISRTPEVTCVVVDVSHEDPEVKFNWYVDGVEVHNAKTKPREEQQNSTYRVVSVLTVLHQDWLNGKEYKCKVSNKALKAPIEKTISKAKGQPREPQVYTLPPSRDELTKNQVSLWCLVKGFYPSDIAVEWESNGQPENNYKTTPPVLDSDGSFFLYSKLTVDKSRWQQGNVFSCSVLHEALHSHYTQKSLSLSPGGGGSGGGGSGGGGSTALGRRKAEDRIKETLWADGVKIDEKDFEHIKSSHEDYFAVEYGKGSGYYDVNKKMDSEDTALCVGAVVTNMFHWWVDQNRENIEKFKKQDPENNGVMKFEGVKEATVDELNEFYRDNRDNYADQSRFFDLIKKHFGNKALNPEELFELYFNGFYYGSSHRYIEDNEPAQNNLFSKVLENNKLLNPERSYGIDGFSNNVINALKSHKVLGLVYTTPLRYRHIISMWGADIDQDGKVKAIYVTDSDDREITFNDNSKRRIGMIRYDVLVDDNGNIRFTGKGATHKEEGAIYAGLYSLSRGDEVWEDYFKKYPEVQENL

SEQ ID NO: 695 - protein, 558 aa, synthetic construct
DKTHTCPPCPAPEAAGAPSVFLFPPKPKDTLMISRTPEVTCVVVDVSHEDPEVKFNWYVDGVEVHNAKTKPREEQQNSTYRVVSVLTVLHQDWLNGKEYKCKVSNKALKAPIEKTISKAKGQPREPQVYTLPPSRDELTKNQVSLTCLVKGFYPSDIAVEWESNGQPENNYKTTPPVLDSDGSFFLYSKLTVDKSRWQQGNVFSCSVLHEALHSHYTQKSLSLSPGGSSAPGSSAPGSSAPTALGRRKAEDRIKETLWADGVKIDEKDFEHIKSSHEDYFAVEYGKGSGYYDVNKKMDSEDTALCVGAVVTNMFHWWVDQNRENIEKFKKQDPENNGVMKFEGVKEATVDELNEFYRDNRDNYADQSRFFDLIKKHFGNKALNPEELFELYFNGFYYGSSHRYIEDNEPAQNNLFSKVLENNKLLNPERSYGIDGFSNNVINALKSHKVLGLVYTTPLRYRHIISMWGADIDQDGKVKAIYVTDSDDREITFNDNSKRRIGMIRYDVLVDDNGNIRFTGKGATHKEEGAIYAGLYSLSRGDEVWEDYFKKYPEVQENL

SEQ ID NO: 696 - protein, 558 aa, synthetic construct
DKTHTCPPCPAPEAAGAPSVFLFPPKPKDTLMISRTPEVTCVVVDVSHEDPEVKFNWYVDGVEVHNAKTKPREEQQNSTYRVVSVLTVLHQDWLNGKEYKCKVSNKALKAPIEKTISKAKGQPREPQVYTLPPSRDELTKNQVSLWCLVKGFYPSDIAVEWESNGQPENNYKTTPPVLDSDGSFFLYSKLTVDKSRWQQGNVFSCSVMHEALHNHYTQKSLSLSPGGSSAPGSSAPGSSAPTALGRRKAEDRIKETLWADGVKIDEKDFEHIKSSHEDYFAVEYGKGSGYYDVNKKMDSEDTALCVGAVVTNMFHWWVDQNRENIEKFKKQDPENNGVMKFEGVKEATVDELNEFYRDNRDNYADQSRFFDLIKKHFGNKALNPEELFELYFNGFYYGSSHRYIEDNEPAQNNLFSKVLENNKLLNPERSYGIDGFSNNVINALKSHKVLGLVYTTPLRYRHIISMWGADIDQDGKVKAIYVTDSDDREITFNDNSKRRIGMIRYDVLVDDNGNIRFTGKGATHKEEGAIYAGLYSLSRGDEVWEDYFKKYPEVQENL

SEQ ID NO: 697 - protein, 558 aa, synthetic construct
DKTHTCPPCPAPEAAGAPSVFLFPPKPKDTLMISRTPEVTCVVVDVSHEDPEVKFNWYVDGVEVHNAKTKPREEQQNSTYRVVSVLTVLHQDWLNGKEYKCKVSNKALKAPIEKTISKAKGQPREPQVYTLPPSRDELTKNQVSLWCLVKGFYPSDIAVEWESNGQPENNYKTTPPVLDSDGSFFLYSKLTVDKSRWQQGNVFSCSVLHEALHSHYTQKSLSLSPGGSSAPGSSAPGSSAPTALGRRKAEDRIKETLWADGVKIDEKDFEHIKSSHEDYFAVEYGKGSGYYDVNKKMDSEDTALCVGAVVTNMFHWWVDQNRENIEKFKKQDPENNGVMKFEGVKEATVDELNEFYRDNRDNYADQSRFFDLIKKHFGNKALNPEELFELYFNGFYYGSSHRYIEDNEPAQNNLFSKVLENNKLLNPERSYGIDGFSNNVINALKSHKVLGLVYTTPLRYRHIISMWGADIDQDGKVKAIYVTDSDDREITFNDNSKRRIGMIRYDVLVDDNGNIRFTGKGATHKEEGAIYAGLYSLSRGDEVWEDYFKKYPEVQENL

SEQ ID NO: 698 - protein, 557 aa, synthetic construct
DKTHTCPPCPAPEAAGAPSVFLFPPKPKDTLMISRTPEVTCVVVDVSHEDPEVKFNWYVDGVEVHNAKTKPREEQQNSTYRVVSVLTVLHQDWLNGKEYKCKVSNKALKAPIEKTISKAKGQPREPQVYTLPPSRDELTKNQVSLTCLVKGFYPSDIAVEWESNGQPENNYKTTPPVLDSDGSFFLYSKLTVDKSRWQQGNVFSCSVLHEALHSHYTQKSLSLSPGGGGSGGGGSGGGGSTALGRRKAEDRIKETLWADGVKIDEKDFEHIKSSHEDYFAVEYGKGSGYYDVNKKMDSEDSALCVGAVVTNMFHWWVDQNRENIEKFKKQDPENNGVMKFEGVKEATVDELNEFYRDNRDNYADQSRFFDLIKKHFGNKALNPEELFELYFNGFYYGSSHRYIEDNEPAQNNLFSKVLENNKLLNPERSYGIDGFSNNVINALKSHKVLGLVYTTPLRYRHIISMWGADIDQDGKVKAIYVTDSDDREITFNDNSKRRIGMIRYDVLVDDNGNIRFTGKGATHKEEGAIYAGLYSLSRGDEVWEDYFKKYPEVQENL

SEQ ID NO: 699 - protein, 557 aa, synthetic construct
DKTHTCPPCPAPEAAGAPSVFLFPPKPKDTLMISRTPEVTCVVVDVSHEDPEVKFNWYVDGVEVHNAKTKPREEQQNSTYRVVSVLTVLHQDWLNGKEYKCKVSNKALKAPIEKTISKAKGQPREPQVYTLPPSRDELTKNQVSLWCLVKGFYPSDIAVEWESNGQPENNYKTTPPVLDSDGSFFLYSKLTVDKSRWQQGNVFSCSVMHEALHNHYTQKSLSLSPGGGGSGGGGSGGGGSTALGRRKAEDRIKETLWADGVKIDEKDFEHIKSSHEDYFAVEYGKGSGYYDVNKKMDSEDSALCVGAVVTNMFHWWVDQNRENIEKFKKQDPENNGVMKFEGVKEATVDELNEFYRDNRDNYADQSRFFDLIKKHFGNKALNPEELFELYFNGFYYGSSHRYIEDNEPAQNNLFSKVLENNKLLNPERSYGIDGFSNNVINALKSHKVLGLVYTTPLRYRHIISMWGADIDQDGKVKAIYVTDSDDREITFNDNSKRRIGMIRYDVLVDDNGNIRFTGKGATHKEEGAIYAGLYSLSRGDEVWEDYFKKYPEVQENL

SEQ ID NO: 700 - protein, 557 aa, synthetic construct
DKTHTCPPCPAPEAAGAPSVFLFPPKPKDTLMISRTPEVTCVVVDVSHEDPEVKFNWYVDGVEVHNAKTKPREEQQNSTYRVVSVLTVLHQDWLNGKEYKCKVSNKALKAPIEKTISKAKGQPREPQVYTLPPSRDELTKNQVSLWCLVKGFYPSDIAVEWESNGQPENNYKTTPPVLDSDGSFFLYSKLTVDKSRWQQGNVFSCSVLHEALHSHYTQKSLSLSPGGGGSGGGGSGGGGSTALGRRKAEDRIKETLWADGVKIDEKDFEHIKSSHEDYFAVEYGKGSGYYDVNKKMDSEDSALCVGAVVTNMFHWWVDQNRENIEKFKKQDPENNGVMKFEGVKEATVDELNEFYRDNRDNYADQSRFFDLIKKHFGNKALNPEELFELYFNGFYYGSSHRYIEDNEPAQNNLFSKVLENNKLLNPERSYGIDGFSNNVINALKSHKVLGLVYTTPLRYRHIISMWGADIDQDGKVKAIYVTDSDDREITFNDNSKRRIGMIRYDVLVDDNGNIRFTGKGATHKEEGAIYAGLYSLSRGDEVWEDYFKKYPEVQENL

SEQ ID NO: 701 - protein, 558 aa, synthetic construct
DKTHTCPPCPAPEAAGAPSVFLFPPKPKDTLMISRTPEVTCVVVDVSHEDPEVKFNWYVDGVEVHNAKTKPREEQQNSTYRVVSVLTVLHQDWLNGKEYKCKVSNKALKAPIEKTISKAKGQPREPQVYTLPPSRDELTKNQVSLTCLVKGFYPSDIAVEWESNGQPENNYKTTPPVLDSDGSFFLYSKLTVDKSRWQQGNVFSCSVMHEALHNHYTQKSLSLSPGGSSAPGSSAPGSSAPTALGRRKAEDRIKETLWADGVKIDEKDFEHIKSSHEDYFAVEYGKGSGYYDVNKKMDSEDSALCVGAVVTNMFHWWVDQNRENIEKFKKQDPENNGVMKFEGVKEATVDELNEFYRDNRDNYADQSRFFDLIKKHFGNKALNPEELFELYFNGFYYGSSHRYIEDNEPAQNNLFSKVLENNKLLNPERSYGIDGFSNNVINALKSHKVLGLVYTTPLRYRHIISMWGADIDQDGKVKAIYVTDSDDREITFNDNSKRRIGMIRYDVLVDDNGNIRFTGKGATHKEEGAIYAGLYSLSRGDEVWEDYFKKYPEVQENL

SEQ ID NO: 702 - protein, 558 aa, synthetic construct
DKTHTCPPCPAPEAAGAPSVFLFPPKPKDTLMISRTPEVTCVVVDVSHEDPEVKFNWYVDGVEVHNAKTKPREEQQNSTYRVVSVLTVLHQDWLNGKEYKCKVSNKALKAPIEKTISKAKGQPREPQVYTLPPSRDELTKNQVSLTCLVKGFYPSDIAVEWESNGQPENNYKTTPPVLDSDGSFFLYSKLTVDKSRWQQGNVFSCSVLHEALHSHYTQKSLSLSPGGSSAPGSSAPGSSAPTALGRRKAEDRIKETLWADGVKIDEKDFEHIKSSHEDYFAVEYGKGSGYYDVNKKMDSEDSALCVGAVVTNMFHWWVDQNRENIEKFKKQDPENNGVMKFEGVKEATVDELNEFYRDNRDNYADQSRFFDLIKKHFGNKALNPEELFELYFNGFYYGSSHRYIEDNEPAQNNLFSKVLENNKLLNPERSYGIDGFSNNVINALKSHKVLGLVYTTPLRYRHIISMWGADIDQDGKVKAIYVTDSDDREITFNDNSKRRIGMIRYDVLVDDNGNIRFTGKGATHKEEGAIYAGLYSLSRGDEVWEDYFKKYPEVQENL

SEQ ID NO: 703 - protein, 558 aa, synthetic construct
DKTHTCPPCPAPEAAGAPSVFLFPPKPKDTLMISRTPEVTCVVVDVSHEDPEVKFNWYVDGVEVHNAKTKPREEQQNSTYRVVSVLTVLHQDWLNGKEYKCKVSNKALKAPIEKTISKAKGQPREPQVYTLPPSRDELTKNQVSLWCLVKGFYPSDIAVEWESNGQPENNYKTTPPVLDSDGSFFLYSKLTVDKSRWQQGNVFSCSVMHEALHNHYTQKSLSLSPGGSSAPGSSAPGSSAPTALGRRKAEDRIKETLWADGVKIDEKDFEHIKSSHEDYFAVEYGKGSGYYDVNKKMDSEDSALCVGAVVTNMFHWWVDQNRENIEKFKKQDPENNGVMKFEGVKEATVDELNEFYRDNRDNYADQSRFFDLIKKHFGNKALNPEELFELYFNGFYYGSSHRYIEDNEPAQNNLFSKVLENNKLLNPERSYGIDGFSNNVINALKSHKVLGLVYTTPLRYRHIISMWGADIDQDGKVKAIYVTDSDDREITFNDNSKRRIGMIRYDVLVDDNGNIRFTGKGATHKEEGAIYAGLYSLSRGDEVWEDYFKKYPEVQENL

SEQ ID NO: 704 - protein, 558 aa, synthetic construct
DKTHTCPPCPAPEAAGAPSVFLFPPKPKDTLMISRTPEVTCVVVDVSHEDPEVKFNWYVDGVEVHNAKTKPREEQQNSTYRVVSVLTVLHQDWLNGKEYKCKVSNKALKAPIEKTISKAKGQPREPQVYTLPPSRDELTKNQVSLWCLVKGFYPSDIAVEWESNGQPENNYKTTPPVLDSDGSFFLYSKLTVDKSRWQQGNVFSCSVLHEALHSHYTQKSLSLSPGGSSAPGSSAPGSSAPTALGRRKAEDRIKETLWADGVKIDEKDFEHIKSSHEDYFAVEYGKGSGYYDVNKKMDSEDSALCVGAVVTNMFHWWVDQNRENIEKFKKQDPENNGVMKFEGVKEATVDELNEFYRDNRDNYADQSRFFDLIKKHFGNKALNPEELFELYFNGFYYGSSHRYIEDNEPAQNNLFSKVLENNKLLNPERSYGIDGFSNNVINALKSHKVLGLVYTTPLRYRHIISMWGADIDQDGKVKAIYVTDSDDREITFNDNSKRRIGMIRYDVLVDDNGNIRFTGKGATHKEEGAIYAGLYSLSRGDEVWEDYFKKYPEVQENL

SEQ ID NO: 705 - protein, 543 aa, synthetic construct
TALGRRKAEDRIKETLWADGVKIDEKDFEHIKSSHEDYFAVEYGKGSGYYDVNKKMDSEDTALCVGAVVTNMFHWWVDQNRENIEKFKKQDPENNGVMKFEGVKEATVDELNEFYRDNRDNYADQSRFFDLIKKHFGNKALNPEELFELYFNGFYYGSSHRYIEDNEPAQNNLFSKVLENNKLLNPERSYGIDGFSNNVINALKSHKVLGLVYTTPLRYRHIISMWGADIDQDGKVKAIYVTDSDDREITFNDNSKRRIGMIRYDVLVDDNGNIRFTGKGATHKEEGAIYAGLYSLSRGDEVWEDYFKKYPEVQENLDKTHTCPPCPAPEAAGAPSVFLFPPKPKDTLMISRTPEVTCVVVDVSHEDPEVKFNWYVDGVEVHNAKTKPREEQQNSTYRVVSVLTVLHQDWLNGKEYKCKVSNKALKAPIEKTISKAKGQPREPQVYTLPPSRDELTKNQVSLTCLVKGFYPSDIAVEWESNGQPENNYKTTPPVLDSDGSFFLYSKLTVDKSRWQQGNVFSCSVMHEALHNHYTQKSLSLSPG

SEQ ID NO: 706 - protein, 543 aa, synthetic construct
TALGRRKAEDRIKETLWADGVKIDEKDFEHIKSSHEDYFAVEYGKGSGYYDVNKKMDSEDTALCVGAVVTNMFHWWVDQNRENIEKFKKQDPENNGVMKFEGVKEATVDELNEFYRDNRDNYADQSRFFDLIKKHFGNKALNPEELFELYFNGFYYGSSHRYIEDNEPAQNNLFSKVLENNKLLNPERSYGIDGFSNNVINALKSHKVLGLVYTTPLRYRHIISMWGADIDQDGKVKAIYVTDSDDREITFNDNSKRRIGMIRYDVLVDDNGNIRFTGKGATHKEEGAIYAGLYSLSRGDEVWEDYFKKYPEVQENLDKTHTCPPCPAPEAAGAPSVFLFPPKPKDTLMISRTPEVTCVVVDVSHEDPEVKFNWYVDGVEVHNAKTKPREEQQNSTYRVVSVLTVLHQDWLNGKEYKCKVSNKALKAPIEKTISKAKGQPREPQVYTLPPSRDELTKNQVSLWCLVKGFYPSDIAVEWESNGQPENNYKTTPPVLDSDGSFFLYSKLTVDKSRWQQGNVFSCSVMHEALHNHYTQKSLSLSPG

SEQ ID NO: 707 - protein, 543 aa, synthetic construct; identical to SEQ ID NO: 259

SEQ ID NO: 708 - protein, 543 aa, synthetic construct; identical to SEQ ID NO: 258

SEQ ID NO: 709 - protein, 558 aa, synthetic construct
DKTHTCPPCPAPEAAGAPSVFLFPPKPKDTLMISRTPEVTCVVVDVSHEDPEVKFNWYVDGVEVHNAKTKPREEQQNSTYRVVSVLTVLHQDWLNGKEYKCKVSNKALKAPIEKTISKAKGQPREPQVYTLPPSRDELTKNQVSLWCLVKGFYPSDIAVEWESNGQPENNYKTTPPVLDSDGSFFLYSKLTVDKSRWQQGNVFSCSVMHEALHNHYTQKSLSLSPGAEEEKAEEEKAEEEKTALGRRKAEDRIKETLWADGVKIDEKDFEHIKSSHEDYFAVEYGKGSGYYDVNKKMDSEDTALCVGAVVTNMFHWWVDQNRENIEKFKKQDPENNGVMKFEGVKEATVDELNEFYRDNRDNYADQSRFFDLIKKHFGNKALNPEELFELYFNGFYYGSSHRYIEDNEPAQNNLFSKVLENNKLLNPERSYGIDGFSNNVINALKSHKVLGLVYTTPLRYRHIISMWGADIDQDGKVKAIYVTDSDDREITFNDNSKRRIGMIRYDVLVDDNGNIRFTGKGATHKEEGAIYAGLYSLSRGDEVWEDYFKKYPEVQENL

SEQ ID NO: 710 - protein, 558 aa, synthetic construct
DKTHTCPPCPAPEAAGAPSVFLFPPKPKDTLMISRTPEVTCVVVDVSHEDPEVKFNWYVDGVEVHNAKTKPREEQQNSTYRVVSVLTVLHQDWLNGKEYKCKVSNKALKAPIEKTISKAKGQPREPQVYTLPPSRDELTKNQVSLWCLVKGFYPSDIAVEWESNGQPENNYKTTPPVLDSDGSFFLYSKLTVDKSRWQQGNVFSCSVMHEALHNHYTQKSLSLSPGEAAAKEAAAKEAAAKTALGRRKAEDRIKETLWADGVKIDEKDFEHIKSSHEDYFAVEYGKGSGYYDVNKKMDSEDTALCVGAVVTNMFHWWVDQNRENIEKFKKQDPENNGVMKFEGVKEATVDELNEFYRDNRDNYADQSRFFDLIKKHFGNKALNPEELFELYFNGFYYGSSHRYIEDNEPAQNNLFSKVLENNKLLNPERSYGIDGFSNNVINALKSHKVLGLVYTTPLRYRHIISMWGADIDQDGKVKAIYVTDSDDREITFNDNSKRRIGMIRYDVLVDDNGNIRFTGKGATHKEEGAIYAGLYSLSRGDEVWEDYFKKYPEVQENL

SEQ ID NO: 711 - protein, 558 aa, synthetic construct
DKTHTCPPCPAPEAAGAPSVFLFPPKPKDTLMISRTPEVTCVVVDVSHEDPEVKFNWYVDGVEVHNAKTKPREEQQNSTYRVVSVLTVLHQDWLNGKEYKCKVSNKALKAPIEKTISKAKGQPREPQVYTLPPSRDELTKNQVSLWCLVKGFYPSDIAVEWESNGQPENNYKTTPPVLDSDGSFFLYSKLTVDKSRWQQGNVFSCSVMHEALHNHYTQKSLSLSPGPAPAPPAPAPPAPAPTALGRRKAEDRIKETLWADGVKIDEKDFEHIKSSHEDYFAVEYGKGSGYYDVNKKMDSEDTALCVGAVVTNMFHWWVDQNRENIEKFKKQDPENNGVMKFEGVKEATVDELNEFYRDNRDNYADQSRFFDLIKKHFGNKALNPEELFELYFNGFYYGSSHRYIEDNEPAQNNLFSKVLENNKLLNPERSYGIDGFSNNVINALKSHKVLGLVYTTPLRYRHIISMWGADIDQDGKVKAIYVTDSDDREITFNDNSKRRIGMIRYDVLVDDNGNIRFTGKGATHKEEGAIYAGLYSLSRGDEVWEDYFKKYPEVQENL

SEQ ID NO: 712 - protein, 558 aa, synthetic construct; identical to SEQ ID NO: 257

SEQ ID NO: 713 - protein, 558 aa, synthetic construct
DKTHTCPPCPAPEAAGAPSVFLFPPKPKDTLMISRTPEVTCVVVDVSHEDPEVKFNWYVDGVEVHNAKTKPREEQQNSTYRVVSVLTVLHQDWLNGKEYKCKVSNKALKAPIEKTISKAKGQPREPQVYTLPPSRDELTKNQVSLWCLVKGFYPSDIAVEWESNGQPENNYKTTPPVLDSDGSFFLYSKLTVDKSRWQQGNVFSCSVMHEALHNHYTQKSLSLSPGEAAAKEAAAKEAAAKTALGRRKAEDRIKETLWADGVKIDEKDFEHIKSSHEDYFAVEYGKGSGYYDVNKKMDSEDSALCVGAVVTNMFHWWVDQNRENIEKFKKQDPENNGVMKFEGVKEATVDELNEFYRDNRDNYADQSRFFDLIKKHFGNKALNPEELFELYFNGFYYGSSHRYIEDNEPAQNNLFSKVLENNKLLNPERSYGIDGFSNNVINALKSHKVLGLVYTTPLRYRHIISMWGADIDQDGKVKAIYVTDSDDREITFNDNSKRRIGMIRYDVLVDDNGNIRFTGKGATHKEEGAIYAGLYSLSRGDEVWEDYFKKYPEVQENL

SEQ ID NO: 714 - protein, 558 aa, synthetic construct
DKTHTCPPCPAPEAAGAPSVFLFPPKPKDTLMISRTPEVTCVVVDVSHEDPEVKFNWYVDGVEVHNAKTKPREEQQNSTYRVVSVLTVLHQDWLNGKEYKCKVSNKALKAPIEKTISKAKGQPREPQVYTLPPSRDELTKNQVSLWCLVKGFYPSDIAVEWESNGQPENNYKTTPPVLDSDGSFFLYSKLTVDKSRWQQGNVFSCSVMHEALHNHYTQKSLSLSPGPAPAPPAPAPPAPAPTALGRRKAEDRIKETLWADGVKIDEKDFEHIKSSHEDYFAVEYGKGSGYYDVNKKMDSEDSALCVGAVVTNMFHWWVDQNRENIEKFKKQDPENNGVMKFEGVKEATVDELNEFYRDNRDNYADQSRFFDLIKKHFGNKALNPEELFELYFNGFYYGSSHRYIEDNEPAQNNLFSKVLENNKLLNPERSYGIDGFSNNVINALKSHKVLGLVYTTPLRYRHIISMWGADIDQDGKVKAIYVTDSDDREITFNDNSKRRIGMIRYDVLVDDNGNIRFTGKGATHKEEGAIYAGLYSLSRGDEVWEDYFKKYPEVQENL

SEQ ID NO: 715 - protein, 557 aa, synthetic construct
DKTHTCPPCPAPEAAGAPSVFLFPPKPKDTLMISRTPEVTCVVVDVSHEDPEVKFNWYVDGVEVHNAKTKPREEQQNSTYRVVSVLTVLHQDWLNGKEYKCKVSNKALKAPIEKTISKAKGQPREPQVYTLPPSRDELTKNQVSLWCLVKGFYPSDIAVEWESNGQPENNYKTTPPVLDSDGSFFLYSKLTVDKSRWQQGNVFSCSVMHEALHNHYTQKSLSLSPGGGGSGGGGSGGGGSTALGRRKAEDRIKETLWADGVKIDEKDFEHIKSSHEDYFAVEYGKGSGYYDVNKKMDSEDTALCVGAVVTNMFHWWVDQNRENIEKFKKQDPENNGVMKFEGVKEATVDELNEFYRDNRDNYADQSRFFDLIKKHFGNKALNPEELFELYFNGFYYGSSHRYIEDNEPAQGNLFSKVLENNKLLNPERSYGIDGFSNNVINALKSHKVLGLVYTTPLRYRHIISMWGADIDQDGKVKAIYVTDSDDREITFNDNSKRRIGMIRYDVLVDKNGNIRFTGKGATHKEEGAIYAGLYSLSRGDEVWEDYFKKYPEVQENL

SEQ ID NO: 716 - protein, 558 aa, synthetic construct
DKTHTCPPCPAPEAAGAPSVFLFPPKPKDTLMISRTPEVTCVVVDVSHEDPEVKFNWYVDGVEVHNAKTKPREEQQNSTYRVVSVLTVLHQDWLNGKEYKCKVSNKALKAPIEKTISKAKGQPREPQVYTLPPSRDELTKNQVSLWCLVKGFYPSDIAVEWESNGQPENNYKTTPPVLDSDGSFFLYSKLTVDKSRWQQGNVFSCSVMHEALHNHYTQKSLSLSPGGSSAPGSSAPGSSAPTALGRRKAEDRIKETLWADGVKIDEKDFEHIKSSHEDYFAVEYGKGSGYYDVNKKMDSEDTALCVGAVVTNMFHWWVDQNRENIEKFKKQDPENNGVMKFEGVKEATVDELNEFYRDNRDNYADQSRFFDLIKKHFGNKALNPEELFELYFNGFYYGSSHRYIEDNEPAQGNLFSKVLENNKLLNPERSYGIDGFSNNVINALKSHKVLGLVYTTPLRYRHIISMWGADIDQDGKVKAIYVTDSDDREITFNDNSKRRIGMIRYDVLVDKNGNIRFTGKGATHKEEGAIYAGLYSLSRGDEVWEDYFKKYPEVQENL

SEQ ID NO: 717 - protein, 557 aa, synthetic construct
DKTHTCPPCPAPEAAGAPSVFLFPPKPKDTLMISRTPEVTCVVVDVSHEDPEVKFNWYVDGVEVHNAKTKPREEQQNSTYRVVSVLTVLHQDWLNGKEYKCKVSNKALKAPIEKTISKAKGQPREPQVYTLPPSRDELTKNQVSLWCLVKGFYPSDIAVEWESNGQPENNYKTTPPVLDSDGSFFLYSKLTVDKSRWQQGNVFSCSVMHEALHNHYTQKSLSLSPGGGGSGGGGSGGGGSTALGRRKAEDRIKETLWADGVKIDEKDFEHIKSSHEDYFAVEYGKGSGYYDVNKKMDSEDSALCVGAVVTNMFHWWVDQNRENIEKFKKQDPENNGVMKFEGVKEATVDELNEFYRDNRDNYADQSRFFDLIKKHFGNKALNPEELFELYFNGFYYGSSHRYIEDNEPAQGNLFSKVLENNKLLNPERSYGIDGFSNNVINALKSHKVLGLVYTTPLRYRHIISMWGADIDQDGKVKAIYVTDSDDREITFNDNSKRRIGMIRYDVLVDKNGNIRFTGKGATHKEEGAIYAGLYSLSRGDEVWEDYFKKYPEVQENL

SEQ ID NO: 718 - protein, 558 aa, synthetic construct
DKTHTCPPCPAPEAAGAPSVFLFPPKPKDTLMISRTPEVTCVVVDVSHEDPEVKFNWYVDGVEVHNAKTKPREEQQNSTYRVVSVLTVLHQDWLNGKEYKCKVSNKALKAPIEKTISKAKGQPREPQVYTLPPSRDELTKNQVSLWCLVKGFYPSDIAVEWESNGQPENNYKTTPPVLDSDGSFFLYSKLTVDKSRWQQGNVFSCSVMHEALHNHYTQKSLSLSPGGSSAPGSSAPGSSAPTALGRRKAEDRIKETLWADGVKIDEKDFEHIKSSHEDYFAVEYGKGSGYYDVNKKMDSEDSALCVGAVVTNMFHWWVDQNRENIEKFKKQDPENNGVMKFEGVKEATVDELNEFYRDNRDNYADQSRFFDLIKKHFGNKALNPEELFELYFNGFYYGSSHRYIEDNEPAQGNLFSKVLENNKLLNPERSYGIDGFSNNVINALKSHKVLGLVYTTPLRYRHIISMWGADIDQDGKVKAIYVTDSDDREITFNDNSKRRIGMIRYDVLVDKNGNIRFTGKGATHKEEGAIYAGLYSLSRGDEVWEDYFKKYPEVQENL

SEQ ID NO: 719 - protein, 557 aa, synthetic construct
DKTHTCPPCPAPEAAGAPSVFLFPPKPKDTLMISRTPEVTCVVVDVSHEDPEVKFNWYVDGVEVHNAKTKPREEQQNSTYRVVSVLTVLHQDWLNGKEYKCKVSNKALKAPIEKTISKAKGQPREPQVYTLPPSRDELTKNQVSLWCLVKGFYPSDIAVEWESNGQPENNYKTTPPVLDSDGSFFLYSKLTVDKSRWQQGNVFSCSVMHEALHNHYTQKSLSLSPGAPAPAPAPAPAPAPTALGRRKAEDRIKETLWADGVKIDEKDFEHIKSSHEDYFAVEYGKGSGYYDVNKKMDSEDTALCVGAVVTNMFHWWVDQNRENIEKFKKQDPENNGVMKFEGVKEATVDELNEFYRDNRDNYADQSRFFDLIKKHFGNKALNPEELFELYFNGFYYGSSHRYIEDNEPAQNNLFSKVLENNKLLNPERSYGIDGFSNNVINALKSHKVLGLVYTTPLRYRHIISMWGADIDQDGKVKAIYVTDSDDREITFNDNSKRRIGMIRYDVLVDDNGNIRFTGKGATHKEEGAIYAGLYSLSRGDEVWEDYFKKYPEVQENL

SEQ ID NO: 720 - protein, 557 aa, synthetic construct
DKTHTCPPCPAPEAAGAPSVFLFPPKPKDTLMISRTPEVTCVVVDVSHEDPEVKFNWYVDGVEVHNAKTKPREEQQNSTYRVVSVLTVLHQDWLNGKEYKCKVSNKALKAPIEKTISKAKGQPREPQVYTLPPSRDELTKNQVSLWCLVKGFYPSDIAVEWESNGQPENNYKTTPPVLDSDGSFFLYSKLTVDKSRWQQGNVFSCSVMHEALHNHYTQKSLSLSPGAPAPAPAPAPAPAPTALGRRKAEDRIKETLWADGVKIDEKDFEHIKSSHEDYFAVEYGKGSGYYDVNKKMDSEDSALCVGAVVTNMFHWWVDQNRENIEKFKKQDPENNGVMKFEGVKEATVDELNEFYRDNRDNYADQSRFFDLIKKHFGNKALNPEELFELYFNGFYYGSSHRYIEDNEPAQNNLFSKVLENNKLLNPERSYGIDGFSNNVINALKSHKVLGLVYTTPLRYRHIISMWGADIDQDGKVKAIYVTDSDDREITFNDNSKRRIGMIRYDVLVDDNGNIRFTGKGATHKEEGAIYAGLYSLSRGDEVWEDYFKKYPEVQENL

SEQ ID NO: 721 - protein, 226 aa, synthetic construct
DKTHTCPPCPAPEAAGAPSVFLFPPKPKDTLMISRTPEVTCVVVDVSHEDPEVKFNWYVDGVEVHNAKTKPREEQQNSTYRVVSVLTVLHQDWLNGKEYKCKVSNKALKAPIEKTISKAKGQPREPQVYTLPPSRDELTKNQVSLTCLVKGFYPSDIAVEWESNGQPENNYKTTPPVLDSDGSFFLYSKLTVDKSRWQQGNVFSCSVMHEALHNHYTQKSLSLSPG

SEQ ID NO: 722 - protein, 226 aa, synthetic construct
DKTHTCPPCPAPEAAGAPSVFLFPPKPKDTLMISRTPEVTCVVVDVSHEDPEVKFNWYVDGVEVHNAKTKPREEQQNSTYRVVSVLTVLHQDWLNGKEYKCKVSNKALKAPIEKTISKAKGQPREPQVYTLPPSRDELTKNQVSLWCLVKGFYPSDIAVEWESNGQPENNYKTTPPVLDSDGSFFLYSKLTVDKSRWQQGNVFSCSVLHEALHSHYTQKSLSLSPG

SEQ ID NO: 723 - protein, 226 aa, synthetic construct
DKTHTCPPCPAPEAAGAPSVFLFPPKPKDTLMISRTPEVTCVVVDVSHEDPEVKFNWYVDGVEVHNAKTKPREEQQNSTYRVVSVLTVLHQDWLNGKEYKCKVSNKALKAPIEKTISKAKGQPREPQVYTLPPSRDELTKNQVSLSCAVKGFYPSDIAVEWESNGQPENNYKTTPPVLDSDGSFFLVSKLTVDKSRWQQGNVFSCSVLHEALHSHYTQKSLSLSPG

SEQ ID NO: 724 - protein, 226 aa, synthetic construct
DKTHTCPPCPAPEAAGAPSVFLFPPKPKDTLMISRTPEVTCVVVDVSHEDPEVKFNWYVDGVEVHNAKTKPREEQQNSTYRVVSVLTVLHQDWLNGKEYKCKVSNKALKAPIEKTISKAKGQPREPQVYTLPPSRDELTKNQVSLTCLVKGFYPSDIAVEWESNGQPENNYKTTPPVLDSDGSFFLYSKLTVDKSRWQQGNVFSCSVLHEALHSHYTQKSLSLSPG

SEQ ID NO: 725 - protein, 226 aa, synthetic construct
DKTHTCPPCPAPEAAGAPSVFLFPPKPKDTLMISRTPEVTCVVVDVSHEDPEVKFNWYVDGVEVHNAKTKPREEQQNSTYRVVSVLTVDHHDWLNGKEYKCKVSNKALKAPIEKTISKAKGQPREPQVYTLPPSRDELTKNQVSLTCLVKGFYPSDIAVEWESNGQPENNYKTTPPVLDSDGSFFLYSKLTVDKSRWQQGNVFSCSVMHEALHSHYTQKSLSLSPG

SEQ ID NO: 726 - protein, 15 aa, synthetic construct
GGGSEGGGSEGGGSE

SEQ ID NO: 727 - protein, 14 aa, synthetic construct
GGGSGGGGSGGGGS

SEQ ID NO: 728 - protein, 29 aa, synthetic construct
GGGSGGGGSGGGGSGGGGSGGGGSGGGGS

SEQ ID NO: 729 - protein, 10 aa, synthetic construct
GSAGKGSAGK

SEQ ID NO: 730 - protein, 15 aa, synthetic construct
GSAGKGSAGKGSAGK

SEQ ID NO: 731 - protein, 20 aa, synthetic construct
GSAGKGSAGKGSAGKGSAGK

SEQ ID NO: 732 - protein, 10 aa, synthetic construct
GSSAPGSSAP

SEQ ID NO: 733 - protein, 15 aa, synthetic construct
GSSAPGSSAPGSSAP

SEQ ID NO: 734 - protein, 15 aa, synthetic construct
EAAAKEAAAKEAAAK

SEQ ID NO: 735 - protein, 15 aa, synthetic construct
PAPAPPAPAPPAPAP

SEQ ID NO: 736 - protein, 14 aa, synthetic construct
APAPAPAPAPAPAP

SEQ ID NO: 737 - protein, 319 aa, synthetic construct
  VARIANT 1: note = M or absent or a signal peptide linked via a peptide bond
XTALGRRKAEDRIKETLWADGVKIDEKDFEHIKSSHEDYFAVEYGKGSGYYDVNKKMDSEDTALCVGAVVTNMFHWWVDQNRENIEKFKKQDPENNGVMKFEGVKEATVDELNHFYKEYQSNKYADQSRFFDLIKKHFGNKALNPEELFELYFNGFYYQSSHRYIEDNEPAQNNLFSKVLENNKLLNPERSYGIDGFSNNVINALKSHKVLGLVHTTPLTYRHIISMWGADIDQDGKVKAIYVTDSNDREITFNDNSKRRIGMIRYDVLVDDNGNIRFTGKGATHKEEGAIYAGLYSLSRGDEVWEDYFKKYPEVQENL

SEQ ID NO: 738 - protein, 318 aa, synthetic construct
TALGRRKAEDRIKETLWADGVKIDEKDFEHIKSSHEDYFAVEYGKGSGYYDVNKKMDSEDTALCVGXVVTNMFHWWVDQNRENIEKFKKQDXENNGVMKFXGVKEATVDELNHFYKEYQSNKYADQSRFFDLIKKHFGNKALNPEELFELYFNGFYYNSSHRYIEDNXPAQNNLFSKVLENNKLLNPERSYGIDGFSNNVINALKSHKVLGLVHTTPLRYRHIISMWGADIDQDGKVKAIYVTDSDDREITFNDNSKRRIGMXRYDVLVDDXGNIRFTGKGATHKEEGAIYAGLYSLSRGDEVWEDYFKKYPEVQENL

SEQ ID NO: 739 - protein, 312 aa, synthetic construct
TALGRRKAEDRIKETLWADGVKIDEKDFEHIKSSHEDYFAVEYGKGSGYYDVNKKMDSEDTALCVGXVVTNMFHWWVDQNRENIEKFKKQDXENNGVMKFXGVKEATVDELNXFYXYADQSRFFDLIKKHFGNKALNPEELFELYFNGFYYXSSHRYIEDNXPAQNNLFSKVLENNKLLNPERSYGIDGFSNNVINALKSHKVLGLVXTTPLRYRHIISMWGADIDQDGKVKAIYVTDSDDREITFNDNSKRRIGMXRYDVLVDDXGNIRFTGKGATHKEEGAIYAGLYSLSRGDEVWEDYFKKYPEVQENL

SEQ ID NO: 740 - protein, 312 aa, synthetic construct
TALGRRKAEDRIKETLWADGVKIDEKDFEHIXSSHEDYFAVEYGKGSGYYDVNKKMDSEDXALCVGXVVTNMFHWWVDQNRENIEKFKXQDXENNGVMKFXGVKEATVDELNXFYXYADQSRFFDLIKKHFXNKALNPEELFELYFNGFYYXSSHRYIEDNXPAQNNLFSKVLXNNKLLNPERSYGIDGFSNNVXNALKSHKVLGLVXTTPLRYRHIISMWGADIDQDGKVKAIYVTDSDDREITFNDNSKRRIGMXRYDVLVDDXGNIRFTGKGATHKEEGAIYAGLYSLSRGDEVWEDYFKKYPEVQENL

SEQ ID NO: 741 - protein, 312 aa, synthetic construct
TALGRRKAEDRIKETLWADGVKIDEKDFEHIXSSHEDYFAVEYGKGSGYYDVNKKMDSEDXALCVGXVVTNMFHWWVXQNRENIEKFKXQDXENNGVMKFXGVKEATVDELNXFYXYADQSRFFDLIKXHFXNKALNPEELFELYFNGFYYXSSXRYIEDNXPAQNNLFSKVLXNNKLLNPERSYGIDGFSNNVXNALKSHKVLGLVXTTPLXYRHIISMWGADIDQDGKVKAIYVTDSDDREITFNDNSKRRIGMXRYDVLVDDXGNIRFTGKGXTHKEEGAIYAGLYSLSXGDEVWEDYFKKYPEVQENL

SEQ ID NO: 742 - protein, 7 aa, synthetic construct
KEYQSNK

SEQ ID NO: 743 - protein, 6 aa, synthetic construct
RDNRDN

SEQ ID NO: 744 - protein, 150 aa, synthetic construct
ENNVADSNKNSEDVEVSSVEFDFLNFKYPKNEDQVSTEDMRLTLKDTNVFNQPQVKISFEEQNGNDWKEKDSGTFEEGKKYRLKIDVNKLALKIYGHLSKNKLNVIVNGKAVNIQNVVKKDSIETSFTIYSDSIDLEKINYWTDSFNNWS

SEQ ID NO: 745 - protein, 318 aa, synthetic construct
TALGRRKAEDRIKETLWADGVKIDEKDFEHIKSSHEDYFAVEYGKGSGYYDVNKKMDSEDSALCVGSVVTNMFHWWVDQNRENIEKFKKQDLENNGVMKFNGVKEATVDELNHFYKEYQSNKYADQSRFFDLIKKHFGNKALNPEELFELYFNGFYYNSSHRYIEDNKPAQNNLFSKVLENNKLLNPERSYGIDGFSNNVINALKSHKVLGLVHTTPLRYRHIISMWGADIDQDGKVKAIYVTDSDDREITFNDNSKRRIGMKRYDVLVDDFGNIRFTGKGATHKEEGAIYAGLYSLSRGDEVWEDYFKKYPEVQENL

SEQ ID NO: 746 - protein, 318 aa, synthetic construct
TALGRRKAEDRIKETLWADGVKIDEKDFEHIKSSHEDYFAVEYGKGSGYYDVNKKMDSEDTALCVGAVVTNMFHWWVDQNRENIEKFKKQDPENNGVMKFNGVKEATVDELNHFYKEYQSNKYADQSRFFDLIKKHFGNKALNPEELFELYFNGFYYNSSHRYIEDNKPAQNNLFSKVLENNKLLNPERSYGIDGFSNNVINALKSHKVLGLVHTTPLRYRHIISMWGADIDQDGKVKAIYVTDSDDREITFNDNSKRRIGMIRYDVLVDDNGNIRFTGKGATHKEEGAIYAGLYSLSRGDEVWEDYFKKYPEVQENL

SEQ ID NO: 747 - protein, 318 aa, synthetic construct
TALGRRKAEDRIKETLWADGVKIDEKDFEHIKSSHEDYFAVEYGKGSGYYDVNKKMDSEDTALCVGAVVTNMFHWWVDQNRENIEKFKKQDPENNGVMKFEGVKEATVDELNHFYKEYQSNKYADQSRFFDLIKKHFGNKALNPEELFELYFNGFYYNSSHRYIEDNEPAQNNLFSKVLENNKLLNPERSYGIDGFSNNVINALKSHKVLGLVHTTPLRYRHIISMWGADIDQDGKVKAIYVTDSDDREITFNDNSKRRIGMIRYDVLVDDNGNIRFTGKGATHKEEGAIYAGLYSLSRGDEVWEDYFKKYPEVQENL

SEQ ID NO: 748 - protein, 318 aa, synthetic construct
TALGRRKAEDRIKETLWADGVKIDEKDFEHIKSSHEDYFAVEYGKGSGYYDVNKKMDSEDTALCVGAVVTNMFHWWVDQNRENIEKFKKQDPENNGVMKFEGVKEATVDELNHFYKEYQSNKYADQSRFFDLIKKHFGNKALNPEELFELYFNGFYYNSSHRYIEDNEPAQNNLFSKVLENNKLLNPERSYGIDGFSNNVINALKSHKVLGLVHTTPLTYRHIISMWGADIDQDGKVKAIYVTDSDDREITFNDNSKRRIGMIRYDVLVDDNGNIRFTGKGATHKEEGAIYAGLYSLSRGDEVWEDYFKKYPEVQENL

SEQ ID NO: 749 - protein, 318 aa, synthetic construct
TALGRRKAEDRIKETLWADGVKIDEKDFEHIKSSHEDYFAVEYGKGSGYYDVNKKMDSEDTALCVGAVVTNMFHWWVDQNRENIEKFKKQDPENNGVMKFNGVKEATVDELNHFYKEYQSNKYADQSRFFDLIKKHFGNKALNPEELFELYFNGFYYQSSHRYIEDNKPAQNNLFSKVLENNKLLNPERSYGIDGFSNNVINALKSHKVLGLVHTTPLRYRHIISMWGADIDQDGKVKAIYVTDSDDREITFNDNSKRRIGMIRYDVLVDDNGNIRFTGKGATHKEEGAIYAGLYSLSRGDEVWEDYFKKYPEVQENL

SEQ ID NO: 750 - protein, 318 aa, synthetic construct
TALGRRKAEDRIKETLWADGVKIDEKDFEHIKSSHEDYFAVEYGKGSGYYDVNKKMDSEDTALCVGAVVTNMFHWWVDQNRENIEKFKKQDPENNGVMKFNGVKEATVDELNHFYKEYQSNKYADQSRFFDLIKKHFGNKALNPEELFELYFNGFYYGSSHRYIEDNKPAQNNLFSKVLENNKLLNPERSYGIDGFSNNVINALKSHKVLGLVHTTPLRYRHIISMWGADIDQDGKVKAIYVTDSDDREITFNDNSKRRIGMIRYDVLVDDNGNIRFTGKGATHKEEGAIYAGLYSLSRGDEVWEDYFKKYPEVQENL

SEQ ID NO: 751 - protein, 318 aa, synthetic construct
TALGRRKAEDRIKETLWADGVKIDEKDFEHIKSSHEDYFAVEYGKGSGYYDVNKKMDSEDTALCVGAVVTNMFHWWVDQNRENIEKFKKQDPENNGVMKFNGVKEATVDELNHFYKEYQSNKYADQSRFFDLIKKHFGNKALNPEELFELYFNGFYYNSSHRYIEDNKPAQNNLFSKVLENNKLLNPERSYGIDGFSNNVINALKSHKVLGLVHTTPLRYRHIISMWGADIDQDGKVKAIYVTDSDDREITFNDQSSRRIGMIRYDVLVDDNGNIRFTGKGATHKEEGAIYAGLYSLSRGDEVWEDYFKKYPEVQENL

SEQ ID NO: 752 - protein, 318 aa, synthetic construct
TALGRRKAEDRIKETLWADGVKIDEKDFEHIKSSHEDYFAVEYGKGSGYYDVNKKMDSEDTALSVGAVVTNMFHWWVDQNRENIEKFKKQDPENNGVMKFNGVKEATVDELNHFYKEYQSNKYADQSRFFDLIKKHFGNKALNPEELFELYFNGFYYNSSHRYIEDNKPAQNNLFSKVLENNKLLNPERSYGIDGFSNNVINALKSHKVLGLVHTTPLRYRHIISMWGADIDQDGKVKAIYVTDSDDREITFNDNSKRRIGMIRYDVLVDDNGNIRFTGKGATHKEEGAIYAGLYSLSRGDEVWEDYFKKYPEVQENL

SEQ ID NO: 753 - protein, 468 aa, synthetic construct
TALGRRKAEDRIKETLWADGVKIDEKDFEHIKSSHEDYFAVEYGKGSGYYDVNKKMDSEDTALCVGAVVTNMFHWWVDQNRENIEKFKKQDPENNGVMKFNGVKEATVDELNHFYKEYQSNKYADQSRFFDLIKKHFGNKALNPEELFELYFNGFYYNSSHRYIEDNKPAQNNLFSKVLENNKLLNPERSYGIDGFSNNVINALKSHKVLGLVHTTPLRYRHIISMWGADIDQDGKVKAIYVTDSDDREITFNDNSKRRIGMIRYDVLVDDNGNIRFTGKGATHKEEGAIYAGLYSLSRGDEVWEDYFKKYPEVQENLENNVADSNKNSEDVEVSSVEFDFLNFKYPKNEDQVSTEDMRLTLKDTNVFNQPQVKISFEEQNGNDWKEKDSGTFEEGKKYRLKIDVNKLALKIYGHLSKNKLNVIVNGKAVNIQNVVKKDSIETSFTIYSDSIDLEKINYWTDSFNNWS

SEQ ID NO: 754 - protein, 317 aa, synthetic construct
TALGRRKAEDRIKETLWADGVKIDEKDFEHIKSSHEDYFAVEYGKGSGYYDVNKKMDSEDTALCVGAVVTNMFHWWVDQNRENIEKFKKQDPENNGVMKFEGVKEATVDELNHFYRDNRDNYADQSRFFDLIKKHFGNKALNPEELFELYFNGFYYGSSHRYIEDNEPAQNNLFSKVLENNKLLNPERSYGIDGFSNNVINALKSHKVLGLVHTTPLRYRHIISMWGADIDQDGKVKAIYVTDSDDREITFNDNSKRRIGMIRYDVLVDDNGNIRFTGKGATHKEEGAIYAGLYSLSRGDEVWEDYFKKYPEVQENL

SEQ ID NO: 755 - protein, 317 aa, synthetic construct
TALGRRKAEDRIKETLWADGVKIDEKDFEHIKSSHEDYFAVEYGKGSGYYDVNKKMDSEDTALCVGAVVTNMFHWWVDQNRENIEKFKKQDPENNGVMKFEGVKEATVDELNHFYRDNRDNYADQSRFFDLIKKHFGNKALNPEELFELYFNGFYYGSSHRYIEDNEPAQNNLFSKVLENNKLLNPERSYGIDGFSNNVINALKSHKVLGLVYTTPLRYRHIISMWGADIDQDGKVKAIYVTDSDDREITFNDNSKRRIGMIRYDVLVDDNGNIRFTGKGATHKEEGAIYAGLYSLSRGDEVWEDYFKKYPEVQENL

SEQ ID NO: 756 - protein, 317 aa, synthetic construct
TALGRRKAEDRIKETLWADGVKIDEKDFEHIKSSHEDYFAVEYGKGSGYYDVNKKMDSEDSALCVGAVVTNMFHWWVDQNRENIEKFKKQDPENNGVMKFEGVKEATVDELNHFYRDNRDNYADQSRFFDLIKKHFGNKALNPEELFELYFNGFYYGSSHRYIEDNEPAQNNLFSKVLENNKLLNPERSYGIDGFSNNVINALKSHKVLGLVHTTPLRYRHIISMWGADIDQDGKVKAIYVTDSDDREITFNDNSKRRIGMIRYDVLVDDNGNIRFTGKGATHKEEGAIYAGLYSLSRGDEVWEDYFKKYPEVQENL

SEQ ID NO: 757 - protein, 317 aa, synthetic construct
TALGRRKAEDRIKETLWADGVKIDEKDFEHIKSSHEDYFAVEYGKGSGYYDVNKKMDSEDTALCVGAVVTNMFHWWVDQNRENIEKFKKQDPENNGVMKFEGVKEATVDELNHFYRDNRDNYADQSRFFDLIKKHFGNKALNPEELFELYFNGFYYGSSHRYIEDNEPAQNNLFSKVLENNKLLNPERSYGIDGFSNNVINALKSHKVLGLVYTTPLTYRHIISMWGADIDQDGKVKAIYVTDSDDREITFNDNSKRRIGMIRYDVLVDDNGNIRFTGKGATHKEEGAIYAGLYSLSRGDEVWEDYFKKYPEVQENL

SEQ ID NO: 758 - protein, 317 aa, synthetic construct
TALGRRKAEDRIKETLWADGVKIDEKDFEHIKSSHEDYFAVEYGKGSGYYDVNKKMDSEDSALCVGAVVTNMFHWWVDQNRENIEKFKKQDPENNGVMKFEGVKEATVDELNHFYRDNRDNYADQSRFFDLIKKHFGNKALNPEELFELYFNGFYYGSSHRYIEDNEPAQNNLFSKVLENNKLLNPERSYGIDGFSNNVINALKSHKVLGLVHTTPLTYRHIISMWGADIDQDGKVKAIYVTDSDDREITFNDNSKRRIGMIRYDVLVDDNGNIRFTGKGATHKEEGAIYAGLYSLSRGDEVWEDYFKKYPEVQENL

SEQ ID NO: 759 - protein, 317 aa, synthetic construct
TALGRRKAEQRIKETLWADGVKIDEKDFEHIKSSHEDYFAVEYGKGSGYYDVNKKMDSEDTALCVGAVVTNMFHWWVDQNRENIEKFKKQDPENNGVMKFEGVKEATVDELNHFYRDNRDNYADQSRFFDLIKKHFGNKALNPEELFELYFNGFYYGSSHRYIEDNEPAQNNLFSKVLENNKLLNPERSYGIDGFSNNVINALKSHKVLGLVHTTPLRYRHIISMWGADIDQDGKVKAIYVTDSDDREITFNDNSKRRIGMIRYDVLVDDNGNIRFTGKGATHKEEGAIYAGLYSLSRGDEVWEDYFKKYPEVQENL

SEQ ID NO: 760 - protein, 317 aa, synthetic construct
TALGRRKAEDRIKETLWADGVKIDEKDFEHIKSSHEDYFAVEYGKGSGYYDVNKKMDSEDSALCVGAVVTNMFHWWVDQNRENIEKFKKQDPENNGVMKFEGVKEATVDELNHFYRDNRDNYADQSRFFDLIKKHFGNKALNPEELFELYFNGFYYGSSHRYIEDNEPAQNNLFSKVLENNKLLNPERSYGIDGFSNNVINALKSHKVLGLVYTTPLRYRHIISMWGADIDQDGKVKAIYVTDSDDREITFNDNSKRRIGMIRYDVLVDDNGNIRFTGKGATHKEEGAIYAGLYSLSRGDEVWEDYFKKYPEVQENL

SEQ ID NO: 761 - protein, 317 aa, synthetic construct
TALGRRKAEDRIKETLWADGVKIDEKDFEHIKSSHEDYFAVEYGKGSGYYDVNKKMDSEDTALCVGAVVTNMFHWWVDQNRENIEKFKKQDPENNGVMKFEGVKEATVDELNHFYRDNRDNYADQSRFFDLIKKHFGNKALNPEELFELYFNGFYYGSSHRYIEDNEPAQNNLFSKVLENNKLLNPERSYGIDGFSNNVINALKSHKVLGLVYTTPLRYRHIISMWGADIDQDGKVKAIYVTDSDDREITFNDNSSRRIGMIRYDVLVDDNGNIRFTGKGATHKEEGAIYAGLYSLSRGDEVWEDYFKKYPEVQENL

SEQ ID NO: 762 - protein, 317 aa, synthetic construct
TALGRRKAEDRIKETLWADGVKIDEKDFEHIKSSHEDYFAVEYGKGSGYYDVNKKMDSEDTALCVGAVVTNMFHWWVDQNRENIEKFKKQDPENNGVMKFEGVKEATVDELNHFYRDNRDNYADQSRFFDLIKKHFGNKALNPEELFELYFNGFYYGSSHRYIEDNEPAQNNLFSKVLENNKLLNPERSYGIDGFSNNVINALKSHKVLGLVHTTPLRYRHIISMWGADIDQDGKVKAIYVTDSDDREITFNDNSSRRIGMIRYDVLVDDNGNIRFTGKGATHKEEGAIYAGLYSLSRGDEVWEDYFKKYPEVQENL

SEQ ID NO: 763 - protein, 317 aa, synthetic construct
TALGRRKAEDRIKETLWADGVKIDEKDFEHIKSSHEDYFAVEYGKGSGYYDVNKKMDSEDTALCVGAVVTNMFHWWVDQNRENIEKFKKQDPENNGVMKFNGVKEATVDELNHFYRDNRDNYADQSRFFDLIKKHFGNKALNPEELFELYFNGFYYGSSHRYIEDNKPAQNNLFSKVLENNKLLNPERSYGIDGFSNNVINALKSHKVLGLVYTTPLRYRHIISMWGADIDQDGKVKAIYVTDSDDREITFNDNSKRRIGMIRYDVLVDDNGNIRFTGKGATHKEEGAIYAGLYSLSRGDEVWEDYFKKYPEVQENL

SEQ ID NO: 764 - protein, 317 aa, synthetic construct
TALGRRKAEDRIKETLWADGVKIDEKDFEHIKSSHEDYFAVEYGKGSGYYDVNKKMDSEDSALCVGAVVTNMFHWWVDQNRENIEKFKKQDPENNGVMKFNGVKEATVDELNHFYRDNRDNYADQSRFFDLIKKHFGNKALNPEELFELYFNGFYYGSSHRYIEDNKPAQNNLFSKVLENNKLLNPERSYGIDGFSNNVINALKSHKVLGLVHTTPLRYRHIISMWGADIDQDGKVKAIYVTDSDDREITFNDNSKRRIGMIRYDVLVDDNGNIRFTGKGATHKEEGAIYAGLYSLSRGDEVWEDYFKKYPEVQENL

SEQ ID NO: 765 - protein, 317 aa, synthetic construct
TALGRRKAEQRIKETLWADGVKIDEKDFEHIKSSHEDYFAVEYGKGSGYYDVNKKMDSEDTALCVGAVVTNMFHWWVDQNRENIEKFKKQDPENNGVMKFNGVKEATVDELNHFYRDNRDNYADQSRFFDLIKKHFGNKALNPEELFELYFNGFYYGSSHRYIEDNKPAQNNLFSKVLENNKLLNPERSYGIDGFSNNVINALKSHKVLGLVHTTPLRYRHIISMWGADIDQDGKVKAIYVTDSDDREITFNDNSKRRIGMIRYDVLVDDNGNIRFTGKGATHKEEGAIYAGLYSLSRGDEVWEDYFKKYPEVQENL

SEQ ID NO: 766 - protein, 317 aa, synthetic construct
TALGRRKAEDRIKETLWADGVKIDEKDFEHIKSSHEDYFAVEYGKGSGYYDVNKKMDSEDTALCVGAVVTNMFHWWVDQNRENIEKFKKQDPENNGVMKFEGVKEATVDELNHFYRDNRDNYADQSRFFDLIKKHFGNKALNPEELFELYFNGFYYQSSHRYIEDNEPAQNNLFSKVLENNKLLNPERSYGIDGFSNNVINALKSHKVLGLVHTTPLRYRHIISMWGADIDQDGKVKAIYVTDSDDREITFNDNSKRRIGMIRYDVLVDDNGNIRFTGKGATHKEEGAIYAGLYSLSRGDEVWEDYFKKYPEVQENL

SEQ ID NO: 767 - protein, 317 aa, synthetic construct
TALGRRKAEQRIKETLWADGVKIDEKDFEHIKSSHEDYFAVEYGKGSGYYDVNKKMDSEDTALCVGAVVTNMFHWWVDQNRENIEKFKKQDPENNGVMKFEGVKEATVDELNHFYRDNRDNYADQSRFFDLIKKHFGNKALNPEELFELYFNGFYYQSSHRYIEDNEPAQNNLFSKVLENNKLLNPERSYGIDGFSNNVINALKSHKVLGLVHTTPLRYRHIISMWGADIDQDGKVKAIYVTDSDDREITFNDNSKRRIGMIRYDVLVDDNGNIRFTGKGATHKEEGAIYAGLYSLSRGDEVWEDYFKKYPEVQENL

SEQ ID NO: 768 - protein, 317 aa, synthetic construct
TALGRRKAEDRIKETLWADGVKIDEKDFEHIKSSHEDYFAVEYGKGSGYYDVNKKMDSEDTALCVGAVVTNMFHWWVDQNRENIEKFKKQDPENNGVMKFEGVKEATVDELNHFYRDNRDNYADQSRFFDLIKKHFGNKALNPEELFELYFNGFYYQSSHRYIEDNEPAQNNLFSKVLENNKLLNPERSYGIDGFSNNVINALKSHKVLGLVYTTPLRYRHIISMWGADIDQDGKVKAIYVTDSDDREITFNDNSKRRIGMIRYDVLVDDNGNIRFTGKGATHKEEGAIYAGLYSLSRGDEVWEDYFKKYPEVQENL

SEQ ID NO: 769 - protein, 317 aa, synthetic construct
TALGRRKAEDRIKETLWADGVKIDEKDFEHIKSSHEDYFAVEYGKGSGYYDVNKKMDSEDSALCVGAVVTNMFHWWVDQNRENIEKFKKQDPENNGVMKFEGVKEATVDELNHFYRDNRDNYADQSRFFDLIKKHFGNKALNPEELFELYFNGFYYQSSHRYIEDNEPAQNNLFSKVLENNKLLNPERSYGIDGFSNNVINALKSHKVLGLVHTTPLRYRHIISMWGADIDQDGKVKAIYVTDSDDREITFNDNSKRRIGMIRYDVLVDDNGNIRFTGKGATHKEEGAIYAGLYSLSRGDEVWEDYFKKYPEVQENL

SEQ ID NO: 770 - protein, 317 aa, synthetic construct
TALGRRKAEDRIKETLWADGVKIDEKDFEHIKSSHEDYFAVEYGKGSGYYDVNKKMDSEDTALCVGAVVTNMFHWWVDQNRENIEKFKKQDPENNGVMKFEGVKEATVDELNHFYRDNRDNYADQSRFFDLIKKHFGNKALNPEELFELYFNGFYYQSSHRYIEDNEPAQNNLFSKVLENNKLLNPERSYGIDGFSNNVINALKSHKVLGLVYTTPLTYRHIISMWGADIDQDGKVKAIYVTDSDDREITFNDNSKRRIGMIRYDVLVDDNGNIRFTGKGATHKEEGAIYAGLYSLSRGDEVWEDYFKKYPEVQENL

SEQ ID NO: 771 - protein, 317 aa, synthetic construct
TALGRRKAEDRIKETLWADGVKIDEKDFEHIKSSHEDYFAVEYGKGSGYYDVNKKMDSEDSALCVGAVVTNMFHWWVDQNRENIEKFKKQDPENNGVMKFEGVKEATVDELNHFYRDNRDNYADQSRFFDLIKKHFGNKALNPEELFELYFNGFYYQSSHRYIEDNEPAQNNLFSKVLENNKLLNPERSYGIDGFSNNVINALKSHKVLGLVHTTPLTYRHIISMWGADIDQDGKVKAIYVTDSDDREITFNDNSKRRIGMIRYDVLVDDNGNIRFTGKGATHKEEGAIYAGLYSLSRGDEVWEDYFKKYPEVQENL

SEQ ID NO: 772 - protein, 317 aa, synthetic construct
TALGRRKAEDRIKETLWADGVKIDEKDFEHIKSSHEDYFAVEYGKGSGYYDVNKKMDSEDSALCVGAVVTNMFHWWVDQNRENIEKFKKQDPENNGVMKFEGVKEATVDELNHFYRDNRDNYADQSRFFDLIKKHFGNKALNPEELFELYFNGFYYQSSHRYIEDNEPAQNNLFSKVLENNKLLNPERSYGIDGFSNNVINALKSHKVLGLVYTTPLRYRHIISMWGADIDQDGKVKAIYVTDSDDREITFNDNSKRRIGMIRYDVLVDDNGNIRFTGKGATHKEEGAIYAGLYSLSRGDEVWEDYFKKYPEVQENL

SEQ ID NO: 773 - protein, 317 aa, synthetic construct
TALGRRKAEDRIKETLWADGVKIDEKDFEHIKSSHEDYFAVEYGKGSGYYDVNKKMDSEDTALCVGAVVTNMFHWWVDQNRENIEKFKKQDPENNGVMKFEGVKEATVDELNHFYRDNRDNYADQSRFFDLIKKHFGNKALNPEELFELYFNGFYYQSSHRYIEDNEPAQNNLFSKVLENNKLLNPERSYGIDGFSNNVINALKSHKVLGLVYTTPLRYRHIISMWGADIDQDGKVKAIYVTDSDDREITFNDNSSRRIGMIRYDVLVDDNGNIRFTGKGATHKEEGAIYAGLYSLSRGDEVWEDYFKKYPEVQENL

SEQ ID NO: 774 - protein, 317 aa, synthetic construct
TALGRRKAEDRIKETLWADGVKIDEKDFEHIKSSHEDYFAVEYGKGSGYYDVNKKMDSEDTALCVGAVVTNMFHWWVDQNRENIEKFKKQDPENNGVMKFEGVKEATVDELNHFYRDNRDNYADQSRFFDLIKKHFGNKALNPEELFELYFNGFYYQSSHRYIEDNEPAQNNLFSKVLENNKLLNPERSYGIDGFSNNVINALKSHKVLGLVHTTPLRYRHIISMWGADIDQDGKVKAIYVTDSDDREITFNDNSSRRIGMIRYDVLVDDNGNIRFTGKGATHKEEGAIYAGLYSLSRGDEVWEDYFKKYPEVQENL

SEQ ID NO: 775 - protein, 317 aa, synthetic construct
TALGRRKAEDRIKETLWADGVKIDEKDFEHIKSSHEDYFAVEYGKGSGYYDVNKKMDSEDTALCVGAVVTNMFHWWVDQNRENIEKFKKQDPENNGVMKFNGVKEATVDELNHFYRDNRDNYADQSRFFDLIKKHFGNKALNPEELFELYFNGFYYQSSHRYIEDNKPAQNNLFSKVLENNKLLNPERSYGIDGFSNNVINALKSHKVLGLVYTTPLRYRHIISMWGADIDQDGKVKAIYVTDSDDREITFNDNSKRRIGMIRYDVLVDDNGNIRFTGKGATHKEEGAIYAGLYSLSRGDEVWEDYFKKYPEVQENL

SEQ ID NO: 776 - protein, 317 aa, synthetic construct
TALGRRKAEDRIKETLWADGVKIDEKDFEHIKSSHEDYFAVEYGKGSGYYDVNKKMDSEDSALCVGAVVTNMFHWWVDQNRENIEKFKKQDPENNGVMKFNGVKEATVDELNHFYRDNRDNYADQSRFFDLIKKHFGNKALNPEELFELYFNGFYYQSSHRYIEDNKPAQNNLFSKVLENNKLLNPERSYGIDGFSNNVINALKSHKVLGLVHTTPLRYRHIISMWGADIDQDGKVKAIYVTDSDDREITFNDNSKRRIGMIRYDVLVDDNGNIRFTGKGATHKEEGAIYAGLYSLSRGDEVWEDYFKKYPEVQENL

SEQ ID NO: 777 - protein, 317 aa, synthetic construct
TALGRRKAEQRIKETLWADGVKIDEKDFEHIKSSHEDYFAVEYGKGSGYYDVNKKMDSEDTALCVGAVVTNMFHWWVDQNRENIEKFKKQDPENNGVMKFNGVKEATVDELNHFYRDNRDNYADQSRFFDLIKKHFGNKALNPEELFELYFNGFYYQSSHRYIEDNKPAQNNLFSKVLENNKLLNPERSYGIDGFSNNVINALKSHKVLGLVHTTPLRYRHIISMWGADIDQDGKVKAIYVTDSDDREITFNDNSKRRIGMIRYDVLVDDNGNIRFTGKGATHKEEGAIYAGLYSLSRGDEVWEDYFKKYPEVQENL

SEQ ID NO: 778 - protein, 317 aa, synthetic construct
TALGRRKAEDRIKETLWADGVKIDEKDFEHIKSSHEDYFAVEYGKGSGYYDVNKKMDSEDTALCVGAVVTNMFHWWVDQNRENIEKFKKQDPENNGVMKFEGVKEATVDELNHFYRDNRDNYADQSRFFDLIKKHFGNKALNPEELFELYFNGFYYNSSHRYIEDNEPAQNNLFSKVLENNKLLNPERSYGIDGFSNNVINALKSHKVLGLVHTTPLRYRHIISMWGADIDQDGKVKAIYVTDSDDREITFNDNSKRRIGMIRYDVLVDDNGNIRFTGKGATHKEEGAIYAGLYSLSRGDEVWEDYFKKYPEVQENL

SEQ ID NO: 779 - protein, 317 aa, synthetic construct
TALGRRKAEDRIKETLWADGVKIDEKDFEHIKSSHEDYFAVEYGKGSGYYDVNKKMDSEDTALCVGAVVTNMFHWWVDQNRENIEKFKKQDPENNGVMKFEGVKEATVDELNHFYRDNRDNYADQSRFFDLIKKHFGNKALNPEELFELYFNGFYYNSSHRYIEDNEPAQNNLFSKVLENNKLLNPERSYGIDGFSNNVINALKSHKVLGLVYTTPLRYRHIISMWGADIDQDGKVKAIYVTDSDDREITFNDNSKRRIGMIRYDVLVDDNGNIRFTGKGATHKEEGAIYAGLYSLSRGDEVWEDYFKKYPEVQENL

SEQ ID NO: 780 - protein, 317 aa, synthetic construct
TALGRRKAEDRIKETLWADGVKIDEKDFEHIKSSHEDYFAVEYGKGSGYYDVNKKMDSEDTALCVGAVVTNMFHWWVDQNRENIEKFKKQDPENNGVMKFEGVKEATVDELNEFYRDNRDNYADQSRFFDLIKKHFPNKALNPEELFELYFNGFYYGSSHRYIEDNEPAQNNLFSKVLENNKLLNPERSYGIDGFSNNVINALKSHKVLGLVYTTPLRYRHIISMWGADIDQDGKVKAIYVTDSDDREITFNDNSKRRIGMIRYDVLVDDNGNIRFTGKGATHKEEGAIYAGLYSLSRGDEVWEDYFKKYPEVQENL

SEQ ID NO: 781 - protein, 317 aa, synthetic construct
TALGRRKAEDRIKETLWADGVKIDEKDFEHIKSSHEDYFAVEYGKGSGYYDVNKKMDSEDTALCVGAVVTNMFHWWVDQNRENIEKFKKQDPENNGVMKFEGVKEATVDELNEFYRDNRDNYADQSRFFDLIKKHFPNKALNPEELFELYFNGFYYGSSHRYIEDNEPAQNNLFSKVLENNKLLNPERSYGIDGFSNNVKNALKSHKVLGLVYTTPLRYRHIISMWGADIDQDGKVKAIYVTDSDDREITFNDNSKRRIGMIRYDVLVDDNGNIRFTGKGATHKEEGAIYAGLYSLSRGDEVWEDYFKKYPEVQENL

SEQ ID NO: 782 - protein, 317 aa, synthetic construct
TALGRRKAEDRIKETLWADGVKIDEKDFEHIKSSHEDYFAVEYGKGSGYYDVNKKMDSEDTALCVGAVVTNMFHWWVDQNRENIEKFKKQDPENNGVMKFEGVKEATVDELNEFYRDNRDNYADQSRFFDLIKKHFPNKALNPEELFELYFNGFYYGSSHRYIEDNEPAQNNLFSKVLENNKLLNPERSYGIDGFSNNVINALKSHKVLGLVYTTPLRYGHIISMWGADIDQDGKVKAIYVTDSDDREITFNDNSKRRIGMIRYDVLVDDNGNIRFTGKGATHKEEGAIYAGLYSLSRGDEVWEDYFKKYPEVQENL

SEQ ID NO: 783 - protein, 317 aa, synthetic construct
TALGRRKAEDRIKETLWADGVKIDEKDFEHIDSSHEDYFAVEYGKGSGYYDVNKKMDSEDTALCVGAVVTNMFHWWVDQNRENIEKFKEQDPENNGVMKFEGVKEATVDELNEFYRDNRDNYADQSRFFDLIKKHFPNKALNPEELFELYFNGFYYGSSHRYIEDNEPAQNNLFSKVLENNKLLNPERSYGIDGFSNNVINALKSHKVLGLVYTTPLRYGHIISMWGADIDQDGKVKAIYVTDSDDREITFNDNSKRRIGMIRYDVLVDDNGNIRFTGKGATHKEEGAIYAGLYSLSRGDEVWEDYFKKYPEVQENL

SEQ ID NO: 784 - protein, 317 aa, synthetic construct
TALGRRKAEDRIKETLWADGVKIDEKDFEHIKSSHEDYFAVEYGKGSGYYDVNKKMDSEDTALCVGAVVTNMFHWWVEQNRENIEKFKKQDPENNGVMKFEGVKEATVDELNEFYRDNRDNYADQSRFFDLIKKHFPNKALNPEELFELYFNGFYYGSSHRYIEDNEPAQNNLFSKVLDNNKLLNPERSYGIDGFSNNVINALKSHKVLGLVYTTPLRYGHIISMWGADIDQDGKVKAIYVTDSDDREITFNDNSKRRIGMIRYDVLVDDNGNIRFTGKGATHKEEGAIYAGLYSLSRGDEVWEDYFKKYPEVQENL

SEQ ID NO: 785 - protein, 317 aa, synthetic construct
TALGRRKAEDRIKETLWADGVKIDEKDFEHIKSSHEDYFAVEYGKGSGYYDVNKKMDSEDTALCVGAVVTNMFHWWVDQNRENIEKFKKQDPENNGVMKFEGVKEATVDELNEFYRDNRDNYADQSRFFDLIKKHFPNKALNPEELFELYFNGFYYGSSHRYIEDNEPAQNNLFSKVLENNKLLNPERSYGIDGFSNNVINALKSHKVLGLVYTTPLRYGHIISMWGADIDQDGKVKAIYVTDSDDREITFNDNSKRRIGMIRYDVLVDDNGNIRFTGKGKTHKEEGAIYAGLYSLSLGDEVWEDYFKKYPEVQENL

SEQ ID NO: 786 - protein, 317 aa, synthetic construct
TALGRRKAEDRIKETLWADGVKIDEKDFEHIKSSHEDYFAVEYGKGSGYYDVNKKMDSEDTALCVGAVVTNMFHWWVEQNRENIEKFKKQDPENNGVMKFEGVKEATVDELNEFYRDNRDNYADQSRFFDLIKKHFPNKALNPEELFELYFNGFYYGSSHRYIEDNEPAQNNLFSKVLDNNKLLNPERSYGIDGFSNNVINALKSHKVLGLVYTTPLRYGHIISMWGADIDQDGKVKAIYVTDSDDREITFNDNSKRRIGMIRYDVLVDDNGNIRFTGKGKTHKEEGAIYAGLYSLSLGDEVWEDYFKKYPEVQENL

SEQ ID NO: 787 - protein, 317 aa, synthetic construct
TALGRRKAEDRIKETLWADGVKIDEKDFEHIDSSHEDYFAVEYGKGSGYYDVNKKMDSEDTALCVGAVVTNMFHWWVEQNRENIEKFKEQDPENNGVMKFEGVKEATVDELNEFYRDNRDNYADQSRFFDLIKKHFPNKALNPEELFELYFNGFYYGSSHRYIEDNEPAQNNLFSKVLDNNKLLNPERSYGIDGFSNNVINALKSHKVLGLVYTTPLRYGHIISMWGADIDQDGKVKAIYVTDSDDREITFNDNSKRRIGMIRYDVLVDDNGNIRFTGKGATHKEEGAIYAGLYSLSRGDEVWEDYFKKYPEVQENL

SEQ ID NO: 788 - protein, 317 aa, synthetic construct
TALGRRKAEDRIKETLWADGVKIDEKDFEHIDSSHEDYFAVEYGKGSGYYDVNKKMDSEDTALCVGAVVTNMFHWWVDQNRENIEKFKEQDPENNGVMKFEGVKEATVDELNEFYRDNRDNYADQSRFFDLIKKHFPNKALNPEELFELYFNGFYYGSSHRYIEDNEPAQNNLFSKVLENNKLLNPERSYGIDGFSNNVINALKSHKVLGLVYTTPLRYGHIISMWGADIDQDGKVKAIYVTDSDDREITFNDNSKRRIGMIRYDVLVDDNGNIRFTGKGKTHKEEGAIYAGLYSLSLGDEVWEDYFKKYPEVQENL

SEQ ID NO: 789 - protein, 317 aa, synthetic construct
TALGRRKAEDRIKETLWADGVKIDEKDFEHIKSSHEDYFAVEYGKGSGYYDVNKKMDSEDTALCVGAVVTNMFHWWVDQNRENIEKFKKQDPENNGVMKFEGVKEATVDELNEFYRDNRDNYADQSRFFDLIKKHFPNKALNPEELFELYFNGFYYGSSHRYIEDNEPAQNNLFSKVLENNKLLNPERSYGIDGFSNNVKNALKSHKVLGLVYTTPLRYGHIISMWGADIDQDGKVKAIYVTDSDDREITFNDNSKRRIGMIRYDVLVDDNGNIRFTGKGATHKEEGAIYAGLYSLSRGDEVWEDYFKKYPEVQENL

SEQ ID NO: 790 - protein, 317 aa, synthetic construct
TALGRRKAEDRIKETLWADGVKIDEKDFEHIDSSHEDYFAVEYGKGSGYYDVNKKMDSEDTALCVGAVVTNMFHWWVDQNRENIEKFKEQDPENNGVMKFEGVKEATVDELNEFYRDNRDNYADQSRFFDLIKKHFPNKALNPEELFELYFNGFYYGSSHRYIEDNEPAQNNLFSKVLENNKLLNPERSYGIDGFSNNVKNALKSHKVLGLVYTTPLRYGHIISMWGADIDQDGKVKAIYVTDSDDREITFNDNSKRRIGMIRYDVLVDDNGNIRFTGKGATHKEEGAIYAGLYSLSRGDEVWEDYFKKYPEVQENL

SEQ ID NO: 791 - protein, 317 aa, synthetic construct
TALGRRKAEDRIKETLWADGVKIDEKDFEHIKSSHEDYFAVEYGKGSGYYDVNKKMDSEDTALCVGAVVTNMFHWWVEQNRENIEKFKKQDPENNGVMKFEGVKEATVDELNEFYRDNRDNYADQSRFFDLIKKHFPNKALNPEELFELYFNGFYYGSSHRYIEDNEPAQNNLFSKVLDNNKLLNPERSYGIDGFSNNVKNALKSHKVLGLVYTTPLRYGHIISMWGADIDQDGKVKAIYVTDSDDREITFNDNSKRRIGMIRYDVLVDDNGNIRFTGKGATHKEEGAIYAGLYSLSRGDEVWEDYFKKYPEVQENL

SEQ ID NO: 792 - protein, 317 aa, synthetic construct
TALGRRKAEDRIKETLWADGVKIDEKDFEHIKSSHEDYFAVEYGKGSGYYDVNKKMDSEDTALCVGAVVTNMFHWWVEQNRENIEKFKKQDPENNGVMKFEGVKEATVDELNEFYRDNRDNYADQSRFFDLIKKHFPNKALNPEELFELYFNGFYYGSSHRYIEDNEPAQNNLFSKVLDNNKLLNPERSYGIDGFSNNVKNALKSHKVLGLVYTTPLRYGHIISMWGADIDQDGKVKAIYVTDSDDREITFNDNSKRRIGMIRYDVLVDDNGNIRFTGKGKTHKEEGAIYAGLYSLSLGDEVWEDYFKKYPEVQENL

SEQ ID NO: 793 - protein, 317 aa, synthetic construct
TALGRRKAEDRIKETLWADGVKIDEKDFEHIDSSHEDYFAVEYGKGSGYYDVNKKMDSEDTALCVGAVVTNMFHWWVEQNRENIEKFKEQDPENNGVMKFEGVKEATVDELNEFYRDNRDNYADQSRFFDLIKKHFPNKALNPEELFELYFNGFYYGSSHRYIEDNEPAQNNLFSKVLDNNKLLNPERSYGIDGFSNNVKNALKSHKVLGLVYTTPLRYGHIISMWGADIDQDGKVKAIYVTDSDDREITFNDNSKRRIGMIRYDVLVDDNGNIRFTGKGATHKEEGAIYAGLYSLSRGDEVWEDYFKKYPEVQENL

SEQ ID NO: 794 - protein, 317 aa, synthetic construct
TALGRRKAEDRIKETLWADGVKIDEKDFEHIDSSHEDYFAVEYGKGSGYYDVNKKMDSEDTALCVGAVVTNMFHWWVDQNRENIEKFKEQDPENNGVMKFEGVKEATVDELNEFYRDNRDNYADQSRFFDLIKKHFPNKALNPEELFELYFNGFYYGSSHRYIEDNEPAQNNLFSKVLENNKLLNPERSYGIDGFSNNVKNALKSHKVLGLVYTTPLRYGHIISMWGADIDQDGKVKAIYVTDSDDREITFNDNSKRRIGMIRYDVLVDDNGNIRFTGKGKTHKEEGAIYAGLYSLSLGDEVWEDYFKKYPEVQENL

SEQ ID NO: 795 - protein, 317 aa, synthetic construct
TALGRRKAEDRIKETLWADGVKIDEKDFEHIDSSHEDYFAVEYGKGSGYYDVNKKMDSEDTALCVGAVVTNMFHWWVEQNRENIEKFKEQDPENNGVMKFEGVKEATVDELNEFYRDNRDNYADQSRFFDLIKKHFPNKALNPEELFELYFNGFYYGSSHRYIEDNEPAQNNLFSKVLDNNKLLNPERSYGIDGFSNNVKNALKSHKVLGLVYTTPLRYGHIISMWGADIDQDGKVKAIYVTDPDDREITFNDNSKRRIGMIRYDVLVDDNGNIRFTGKGATHKEEGAIYAGLYSLSRGDEVWEDYFKKYPEVQENL

SEQ ID NO: 796 - protein, 317 aa, synthetic construct
TALGRRKAEDRIKETLWADGVKIDEKDFEHIDSSHEDYFAVEYGKGSGYYDVNKKMDSEDTALCVGAVVTNMFHWWVDQNRENIEKFKEQDPENNGVMKFEGVKEATVDELNEFYRDNRDNYADQSRFFDLIKKHFPNKALNPEELFELYFNGFYYGSSHRYIEDNEPAQNNLFSKVLENNKLLNPERSYGIDGFSNNVKNALKSHKVLGLVYTTPLRYGHIISMWGADIDQDGKVKAIYVTDPDDREITFNDNSKRRIGMIRYDVLVDDNGNIRFTGKGKTHKEEGAIYAGLYSLSLGDEVWEDYFKKYPEVQENL

SEQ ID NO: 797 - protein, 317 aa, synthetic construct
TALGRRKAEDRIKETLWADGVKIDEKDFEHIDSSHEDYFAVEYGKGSGYYDVNKKMDSEDTALCVGAVVTNMFHWWVEQNRENIEKFKEQDPENNGVMKFEGVKEATVDELNEFYRDNRDNYADQSRFFDLIKKHFPNKALNPEELFELYFNGFYYGSSHRYIEDNEPAQNNLFSKVLDNNKLLNPERSYGIDGFSNNVKNALKSHKVLGLVYTTPLRYGHIISMWGADIDQDGKVKAIYVTDPDDREITFNDNSKRRIGMIRYDVLVDDNGNIRFTGKGKTHKEEGAIYAGLYSLSLGDEVWEDYFKKYPEVQENL

SEQ ID NO: 798 - protein, 317 aa, synthetic construct
TALGRRKAEDRIKETLWADGVKIDEKDFEHIDSSHEDYFAVEYGKGSGYYDVNKKMDSEDTALCVGAVVTNMFHWWVDQNRENIEKFKEQDPENNGVMKFEGVKEATVDELNEFYRDNRDNYADQSRFFDLIKKHFPNKALNPEELFELYFNGFYYGSSHRYIEDNEPAQNNLFSKVLENNKLLNPERSYGIDGFSNNVKNALKSHKVLGLVYTTPLRYGHIISMWGADIDQDGKVKAIYVTDSDDREITFNDNSKRRIGMIRYDVLVDDEGNIRFTGKGATHKEEGAIYAGLYSLSRGDEVWEDYFKKYPEVQENL

SEQ ID NO: 799 - protein, 317 aa, synthetic construct
TALGRRKAEDRIKETLWADGVKIDEKDFEHIDSSHEDYFAVEYGKGSGYYDVNKKMDSEDTALCVGAVVTNMFHWWVEQNRENIEKFKEQDPENNGVMKFEGVKEATVDELNEFYRDNRDNYADQSRFFDLIKKHFPNKALNPEELFELYFNGFYYGSSHRYIEDNEPAQNNLFSKVLDNNKLLNPERSYGIDGFSNNVKNALKSHKVLGLVYTTPLRYGHIISMWGADIDQDGKVKAIYVTDSDDREITFNDNSKRRIGMIRYDVLVDDEGNIRFTGKGATHKEEGAIYAGLYSLSRGDEVWEDYFKKYPEVQENL

SEQ ID NO: 800 - protein, 317 aa, synthetic construct
TALGRRKAEDRIKETLWADGVKIDEKDFEHIDSSHEDYFAVEYGKGSGYYDVNKKMDSEDTALCVGAVVTNMFHWWVEQNRENIEKFKEQDPENNGVMKFEGVKEATVDELNEFYRDNRDNYADQSRFFDLIKKHFPNKALNPEELFELYFNGFYYGSSHRYIEDNEPAQNNLFSKVLDNNKLLNPERSYGIDGFSNNVKNALKSHKVLGLVYTTPLRYGHIISMWGADIDQDGKVKAIYVTDSDDREITFNDNSKRRIGMIRYDVLVDDEGNIRFTGKGKTHKEEGAIYAGLYSLSLGDEVWEDYFKKYPEVQENL

SEQ ID NO: 801 - protein, 317 aa, synthetic construct
TALGRRKAEDRIKETLWADGVKIDEKDFEHIDSSHEDYFAVEYGKGSGYYDVNKKMDSEDTALCVGAVVTNMFHWWVEQNRENIEKFKEQDPENNGVMKFEGVKEATVDELNEFYRDNRDNYADQSRFFDLIKKHFPNKALNPEELFELYFNGFYYGSSHRYIEDNEPAQNNLFSKVLDNNKLLNPERSYGIDGFSNNVKNALKSHKVLGLVYTTPLRYGHIISMWGADIDQDGKVKAIYVTDPDDREITFNDNSKRRIGMIRYDVLVDDEGNIRFTGKGATHKEEGAIYAGLYSLSRGDEVWEDYFKKYPEVQENL

SEQ ID NO: 802 - protein, 317 aa, synthetic construct
TALGRRKAEDRIKETLWADGVKIDEKDFEHIDSSHEDYFAVEYGKGSGYYDVNKKMDSEDTALCVGAVVTNMFHWWVDQNRENIEKFKEQDPENNGVMKFEGVKEATVDELNEFYRDNRDNYADQSRFFDLIKKHFPNKALNPEELFELYFNGFYYGSSHRYIEDNEPAQNNLFSKVLENNKLLNPERSYGIDGFSNNVKNALKSHKVLGLVYTTPLRYGHIISMWGADIDQDGKVKAIYVTDPDDREITFNDNSKRRIGMIRYDVLVDDEGNIRFTGKGKTHKEEGAIYAGLYSLSLGDEVWEDYFKKYPEVQENL

SEQ ID NO: 803 - protein, 317 aa, synthetic construct
TALGRRKAEDRIKETLWADGVKIDEKDFEHIDSSHEDYFAVEYGKGSGYYDVNKKMDSEDTALCVGAVVTNMFHWWVEQNRENIEKFKEQDPENNGVMKFEGVKEATVDELNEFYRDNRDNYADQSRFFDLIKKHFPNKALNPEELFELYFNGFYYGSSHRYIEDNEPAQNNLFSKVLDNNKLLNPERSYGIDGFSNNVKNALKSHKVLGLVYTTPLRYGHIISMWGADIDQDGKVKAIYVTDPDDREITFNDNSKRRIGMIRYDVLVDDEGNIRFTGKGKTHKEEGAIYAGLYSLSLGDEVWEDYFKKYPEVQENL

SEQ ID NO: 804 - protein, 317 aa, synthetic construct
TALGRRKAEDRIKETLWADGVKIDEKDFEHIKSSHEDYFAVEYGKGSGYYDVNKKMDSEDTALCVGAVVTNMFHWWVDQNRENIEKFKKQDPENNGVMKFEGVKEATVDELNEFYRDNRDNYADQSRFFDLIKKHFPNKALNPEELFELYFNGFYYGSSHRYIEDNEPAQNNLFSKVLENNKLLNPERSYGIDGFSNNVINALKSHKVLGLVYTTPLRSRHIISMWGADIDQDGKVKAIYVTDSDDREITFNDNSKRRIGMIRYDVLVDDNGNIRFTGKGATHKEEGAIYAGLYSLSRGDEVWEDYFKKYPEVQENL

SEQ ID NO: 805 - protein, 317 aa, synthetic construct
TALGRRKAEDRIKETLWADGVKIDEKDFEHIDSSHEDYFAVEYGKGSGYYDVNKKMDSEDTALCVGAVVTNMFHWWVDQNRENIEKFKEQDPENNGVMKFEGVKEATVDELNEFYRDNRDNYADQSRFFDLIKKHFPNKALNPEELFELYFNGFYYGSSHRYIEDNEPAQNNLFSKVLENNKLLNPERSYGIDGFSNNVINALKSHKVLGLVYTTPLRSRHIISMWGADIDQDGKVKAIYVTDSDDREITFNDNSKRRIGMIRYDVLVDDNGNIRFTGKGATHKEEGAIYAGLYSLSRGDEVWEDYFKKYPEVQENL

SEQ ID NO: 806 - protein, 317 aa, synthetic construct
TALGRRKAEDRIKETLWADGVKIDEKDFEHIKSSHEDYFAVEYGKGSGYYDVNKKMDSEDTALCVGAVVTNMFHWWVEQNRENIEKFKKQDPENNGVMKFEGVKEATVDELNEFYRDNRDNYADQSRFFDLIKKHFPNKALNPEELFELYFNGFYYGSSHRYIEDNEPAQNNLFSKVLDNNKLLNPERSYGIDGFSNNVINALKSHKVLGLVYTTPLRSRHIISMWGADIDQDGKVKAIYVTDSDDREITFNDNSKRRIGMIRYDVLVDDNGNIRFTGKGATHKEEGAIYAGLYSLSRGDEVWEDYFKKYPEVQENL

SEQ ID NO: 807 - protein, 317 aa, synthetic construct
TALGRRKAEDRIKETLWADGVKIDEKDFEHIKSSHEDYFAVEYGKGSGYYDVNKKMDSEDTALCVGAVVTNMFHWWVDQNRENIEKFKKQDPENNGVMKFEGVKEATVDELNEFYRDNRDNYADQSRFFDLIKKHFPNKALNPEELFELYFNGFYYGSSHRYIEDNEPAQNNLFSKVLENNKLLNPERSYGIDGFSNNVINALKSHKVLGLVYTTPLRSRHIISMWGADIDQDGKVKAIYVTDSDDREITFNDNSKRRIGMIRYDVLVDDNGNIRFTGKGKTHKEEGAIYAGLYSLSLGDEVWEDYFKKYPEVQENL

SEQ ID NO: 808 - protein, 317 aa, synthetic construct
TALGRRKAEDRIKETLWADGVKIDEKDFEHIKSSHEDYFAVEYGKGSGYYDVNKKMDSEDTALCVGAVVTNMFHWWVEQNRENIEKFKKQDPENNGVMKFEGVKEATVDELNEFYRDNRDNYADQSRFFDLIKKHFPNKALNPEELFELYFNGFYYGSSHRYIEDNEPAQNNLFSKVLDNNKLLNPERSYGIDGFSNNVINALKSHKVLGLVYTTPLRSRHIISMWGADIDQDGKVKAIYVTDSDDREITFNDNSKRRIGMIRYDVLVDDNGNIRFTGKGKTHKEEGAIYAGLYSLSLGDEVWEDYFKKYPEVQENL

SEQ ID NO: 809 - protein, 317 aa, synthetic construct
TALGRRKAEDRIKETLWADGVKIDEKDFEHIDSSHEDYFAVEYGKGSGYYDVNKKMDSEDTALCVGAVVTNMFHWWVEQNRENIEKFKEQDPENNGVMKFEGVKEATVDELNEFYRDNRDNYADQSRFFDLIKKHFPNKALNPEELFELYFNGFYYGSSHRYIEDNEPAQNNLFSKVLDNNKLLNPERSYGIDGFSNNVINALKSHKVLGLVYTTPLRSRHIISMWGADIDQDGKVKAIYVTDSDDREITFNDNSKRRIGMIRYDVLVDDNGNIRFTGKGATHKEEGAIYAGLYSLSRGDEVWEDYFKKYPEVQENL

SEQ ID NO: 810 - protein, 317 aa, synthetic construct
TALGRRKAEDRIKETLWADGVKIDEKDFEHIDSSHEDYFAVEYGKGSGYYDVNKKMDSEDTALCVGAVVTNMFHWWVDQNRENIEKFKEQDPENNGVMKFEGVKEATVDELNEFYRDNRDNYADQSRFFDLIKKHFPNKALNPEELFELYFNGFYYGSSHRYIEDNEPAQNNLFSKVLENNKLLNPERSYGIDGFSNNVINALKSHKVLGLVYTTPLRSRHIISMWGADIDQDGKVKAIYVTDSDDREITFNDNSKRRIGMIRYDVLVDDNGNIRFTGKGKTHKEEGAIYAGLYSLSLGDEVWEDYFKKYPEVQENL

SEQ ID NO: 811 - protein, 317 aa, synthetic construct
TALGRRKAEDRIKETLWADGVKIDEKDFEHIKSSHEDYFAVEYGKGSGYYDVNKKMDSEDTALCVGAVVTNMFHWWVDQNRENIEKFKKQDPENNGVMKFEGVKEATVDELNEFYRDNRDNYADQSRFFDLIKKHFPNKALNPEELFELYFNGFYYGSSHRYIEDNEPAQNNLFSKVLENNKLLNPERSYGIDGFSNNVKNALKSHKVLGLVYTTPLRSRHIISMWGADIDQDGKVKAIYVTDSDDREITFNDNSKRRIGMIRYDVLVDDNGNIRFTGKGATHKEEGAIYAGLYSLSRGDEVWEDYFKKYPEVQENL

SEQ ID NO: 812 - protein, 317 aa, synthetic construct
TALGRRKAEDRIKETLWADGVKIDEKDFEHIDSSHEDYFAVEYGKGSGYYDVNKKMDSEDTALCVGAVVTNMFHWWVDQNRENIEKFKEQDPENNGVMKFEGVKEATVDELNEFYRDNRDNYADQSRFFDLIKKHFPNKALNPEELFELYFNGFYYGSSHRYIEDNEPAQNNLFSKVLENNKLLNPERSYGIDGFSNNVKNALKSHKVLGLVYTTPLRSRHIISMWGADIDQDGKVKAIYVTDSDDREITFNDNSKRRIGMIRYDVLVDDNGNIRFTGKGATHKEEGAIYAGLYSLSRGDEVWEDYFKKYPEVQENL

SEQ ID NO: 813 - protein, 317 aa, synthetic construct
TALGRRKAEDRIKETLWADGVKIDEKDFEHIKSSHEDYFAVEYGKGSGYYDVNKKMDSEDTALCVGAVVTNMFHWWVEQNRENIEKFKKQDPENNGVMKFEGVKEATVDELNEFYRDNRDNYADQSRFFDLIKKHFPNKALNPEELFELYFNGFYYGSSHRYIEDNEPAQNNLFSKVLDNNKLLNPERSYGIDGFSNNVKNALKSHKVLGLVYTTPLRSRHIISMWGADIDQDGKVKAIYVTDSDDREITFNDNSKRRIGMIRYDVLVDDNGNIRFTGKGATHKEEGAIYAGLYSLSRGDEVWEDYFKKYPEVQENL

SEQ ID NO: 814 - protein, 317 aa, synthetic construct
TALGRRKAEDRIKETLWADGVKIDEKDFEHIKSSHEDYFAVEYGKGSGYYDVNKKMDSEDTALCVGAVVTNMFHWWVDQNRENIEKFKKQDPENNGVMKFEGVKEATVDELNEFYRDNRDNYADQSRFFDLIKKHFPNKALNPEELFELYFNGFYYGSSHRYIEDNEPAQNNLFSKVLENNKLLNPERSYGIDGFSNNVKNALKSHKVLGLVYTTPLRSRHIISMWGADIDQDGKVKAIYVTDSDDREITFNDNSKRRIGMIRYDVLVDDNGNIRFTGKGKTHKEEGAIYAGLYSLSLGDEVWEDYFKKYPEVQENL

SEQ ID NO: 815 - protein, 317 aa, synthetic construct
TALGRRKAEDRIKETLWADGVKIDEKDFEHIKSSHEDYFAVEYGKGSGYYDVNKKMDSEDTALCVGAVVTNMFHWWVEQNRENIEKFKKQDPENNGVMKFEGVKEATVDELNEFYRDNRDNYADQSRFFDLIKKHFPNKALNPEELFELYFNGFYYGSSHRYIEDNEPAQNNLFSKVLDNNKLLNPERSYGIDGFSNNVKNALKSHKVLGLVYTTPLRSRHIISMWGADIDQDGKVKAIYVTDSDDREITFNDNSKRRIGMIRYDVLVDDNGNIRFTGKGKTHKEEGAIYAGLYSLSLGDEVWEDYFKKYPEVQENL

SEQ ID NO: 816 - protein, 317 aa, synthetic construct
TALGRRKAEDRIKETLWADGVKIDEKDFEHIDSSHEDYFAVEYGKGSGYYDVNKKMDSEDTALCVGAVVTNMFHWWVEQNRENIEKFKEQDPENNGVMKFEGVKEATVDELNEFYRDNRDNYADQSRFFDLIKKHFPNKALNPEELFELYFNGFYYGSSHRYIEDNEPAQNNLFSKVLDNNKLLNPERSYGIDGFSNNVKNALKSHKVLGLVYTTPLRSRHIISMWGADIDQDGKVKAIYVTDSDDREITFNDNSKRRIGMIRYDVLVDDNGNIRFTGKGATHKEEGAIYAGLYSLSRGDEVWEDYFKKYPEVQENL

SEQ ID NO: 817 - protein, 317 aa, synthetic construct
TALGRRKAEDRIKETLWADGVKIDEKDFEHIDSSHEDYFAVEYGKGSGYYDVNKKMDSEDTALCVGAVVTNMFHWWVDQNRENIEKFKEQDPENNGVMKFEGVKEATVDELNEFYRDNRDNYADQSRFFDLIKKHFPNKALNPEELFELYFNGFYYGSSHRYIEDNEPAQNNLFSKVLENNKLLNPERSYGIDGFSNNVKNALKSHKVLGLVYTTPLRSRHIISMWGADIDQDGKVKAIYVTDSDDREITFNDNSKRRIGMIRYDVLVDDNGNIRFTGKGKTHKEEGAIYAGLYSLSLGDEVWEDYFKKYPEVQENL

SEQ ID NO: 818 - protein, 317 aa, synthetic construct
TALGRRKAEDRIKETLWADGVKIDEKDFEHIDSSHEDYFAVEYGKGSGYYDVNKKMDSEDTALCVGAVVTNMFHWWVEQNRENIEKFKEQDPENNGVMKFEGVKEATVDELNEFYRDNRDNYADQSRFFDLIKKHFPNKALNPEELFELYFNGFYYGSSHRYIEDNEPAQNNLFSKVLDNNKLLNPERSYGIDGFSNNVKNALKSHKVLGLVYTTPLRSRHIISMWGADIDQDGKVKAIYVTDPDDREITFNDNSKRRIGMIRYDVLVDDNGNIRFTGKGKTHKEEGAIYAGLYSLSLGDEVWEDYFKKYPEVQENL

SEQ ID NO: 819 - protein, 317 aa, synthetic construct
TALGRRKAEDRIKETLWADGVKIDEKDFEHIDSSHEDYFAVEYGKGSGYYDVNKKMDSEDTALCVGAVVTNMFHWWVDQNRENIEKFKEQDPENNGVMKFEGVKEATVDELNEFYRDNRDNYADQSRFFDLIKKHFPNKALNPEELFELYFNGFYYGSSHRYIEDNEPAQNNLFSKVLENNKLLNPERSYGIDGFSNNVKNALKSHKVLGLVYTTPLRSRHIISMWGADIDQDGKVKAIYVTDSDDREITFNDNSKRRIGMIRYDVLVDDEGNIRFTGKGATHKEEGAIYAGLYSLSRGDEVWEDYFKKYPEVQENL

SEQ ID NO: 820 - protein, 317 aa, synthetic construct
TALGRRKAEDRIKETLWADGVKIDEKDFEHIDSSHEDYFAVEYGKGSGYYDVNKKMDSEDTALCVGAVVTNMFHWWVEQNRENIEKFKEQDPENNGVMKFEGVKEATVDELNEFYRDNRDNYADQSRFFDLIKKHFPNKALNPEELFELYFNGFYYGSSHRYIEDNEPAQNNLFSKVLDNNKLLNPERSYGIDGFSNNVKNALKSHKVLGLVYTTPLRSRHIISMWGADIDQDGKVKAIYVTDSDDREITFNDNSKRRIGMIRYDVLVDDEGNIRFTGKGATHKEEGAIYAGLYSLSRGDEVWEDYFKKYPEVQENL

SEQ ID NO: 821 - protein, 317 aa, synthetic construct
TALGRRKAEDRIKETLWADGVKIDEKDFEHIDSSHEDYFAVEYGKGSGYYDVNKKMDSEDTALCVGAVVTNMFHWWVEQNRENIEKFKEQDPENNGVMKFEGVKEATVDELNEFYRDNRDNYADQSRFFDLIKKHFPNKALNPEELFELYFNGFYYGSSHRYIEDNEPAQNNLFSKVLDNNKLLNPERSYGIDGFSNNVKNALKSHKVLGLVYTTPLRSRHIISMWGADIDQDGKVKAIYVTDSDDREITFNDNSKRRIGMIRYDVLVDDEGNIRFTGKGKTHKEEGAIYAGLYSLSLGDEVWEDYFKKYPEVQENL

SEQ ID NO: 822 - protein, 317 aa, synthetic construct
TALGRRKAEDRIKETLWADGVKIDEKDFEHIDSSHEDYFAVEYGKGSGYYDVNKKMDSEDTALCVGAVVTNMFHWWVEQNRENIEKFKEQDPENNGVMKFEGVKEATVDELNEFYRDNRDNYADQSRFFDLIKKHFPNKALNPEELFELYFNGFYYGSSHRYIEDNEPAQNNLFSKVLDNNKLLNPERSYGIDGFSNNVKNALKSHKVLGLVYTTPLRSRHIISMWGADIDQDGKVKAIYVTDPDDREITFNDNSKRRIGMIRYDVLVDDEGNIRFTGKGATHKEEGAIYAGLYSLSRGDEVWEDYFKKYPEVQENL

SEQ ID NO: 823 - protein, 318 aa, synthetic construct
TALGRRKAEDRIKETLWADGVKIDEKDFEHIKSSHEDYFAVEYGKGSGYYDVNKKMDSEDTALCVGAVVTNMFHWWVDQNRENIEKFKKQDPENNGVMKFNGVKEATVDELNHFYKEYQSNKYADQSRFFDLIKKHFGNKALNPEELFELYFNGFYYNSSHRYIEDNKPAQNNLFSKVLENNKLLNPERSYGIDGFSNNVINALKSHKVLGLVYTTPLRYRHIISMWGADIDQDGKVKAIYVTDSDDREITFNDNSKRRIGMIRYDVLVDDNGNIRFTGKGATHKEEGAIYAGLYSLSRGDEVWEDYFKKYPEVQENL

SEQ ID NO: 824-827 - skipped (4 entries)

SEQ ID NO: 828 - protein, 317 aa, synthetic construct
TALGRRKAEDRIKETLWADGVKIDEKDFEHIDSSHEDYFAVEYGKGSGYYDVNKKMDSEDTALCVGAVVTNMFHWWVEQNRENIEKFKEQDPENNGVMKFEGVKEATVDELNEFYRDNRDNYADQSRFFDLIKKHFPNKALNPEELFELYFNGFYYGSSHRYIEDNEPAQNNLFSKVLDNNKLLNPERSYGIDGFSNNVKNALKSHKVLGLVYTTPLRSRHIISMWGADIDQDGKVKAIYVTDPDDREITFNDNSKRRIGMIRYDVLVDDEGNIRFTGKGKTHKEEGAIYAGLYSLSLGDEVWEDYFKKYPEVQENL

SEQ ID NO: 829 - protein, 317 aa, synthetic construct
TALGRRKAEDRIKETLWADGVKIDEKDFEHIDSSHEDYFAVEYGKGSGYYDVNKKMDSEDTALCVGAVVTNMFHWWVDQNRENIEKFKEQDPENNGVMKFEGVKEATVDELNEFYRDNRDNYADQSRFFDLIKKHFPNKALNPEELFELYFNGFYYGSSHRYIEDNEPAQNNLFSKVLENNKLLNPERSYGIDGFSNNVKNALKSHKVLGLVYTTPLRYRHIISMWGADIDQDGKVKAIYVTDSDDREITFNDNSKRRIGMIRYDVLVDDNGNIRFTGKGATHKEEGAIYAGLYSLSRGDEVWEDYFKKYPEVQENL

SEQ ID NO: 830 - protein, 317 aa, synthetic construct
TALGRRKAEDRIKETLWADGVKIDEKDFEHIKSSHEDYFAVEYGKGSGYYDVNKKMDSEDTALCVGAVVTNMFHWWVEQNRENIEKFKKQDPENNGVMKFEGVKEATVDELNEFYRDNRDNYADQSRFFDLIKKHFPNKALNPEELFELYFNGFYYGSSHRYIEDNEPAQNNLFSKVLDNNKLLNPERSYGIDGFSNNVKNALKSHKVLGLVYTTPLRYRHIISMWGADIDQDGKVKAIYVTDSDDREITFNDNSKRRIGMIRYDVLVDDNGNIRFTGKGATHKEEGAIYAGLYSLSRGDEVWEDYFKKYPEVQENL

SEQ ID NO: 831 - protein, 317 aa, synthetic construct
TALGRRKAEDRIKETLWADGVKIDEKDFEHIKSSHEDYFAVEYGKGSGYYDVNKKMDSEDTALCVGAVVTNMFHWWVDQNRENIEKFKKQDPENNGVMKFEGVKEATVDELNEFYRDNRDNYADQSRFFDLIKKHFPNKALNPEELFELYFNGFYYGSSHRYIEDNEPAQNNLFSKVLENNKLLNPERSYGIDGFSNNVKNALKSHKVLGLVYTTPLRYRHIISMWGADIDQDGKVKAIYVTDSDDREITFNDNSKRRIGMIRYDVLVDDNGNIRFTGKGKTHKEEGAIYAGLYSLSLGDEVWEDYFKKYPEVQENL

SEQ ID NO: 832 - protein, 317 aa, synthetic construct
TALGRRKAEDRIKETLWADGVKIDEKDFEHIKSSHEDYFAVEYGKGSGYYDVNKKMDSEDTALCVGAVVTNMFHWWVEQNRENIEKFKKQDPENNGVMKFEGVKEATVDELNEFYRDNRDNYADQSRFFDLIKKHFPNKALNPEELFELYFNGFYYGSSHRYIEDNEPAQNNLFSKVLDNNKLLNPERSYGIDGFSNNVKNALKSHKVLGLVYTTPLRYRHIISMWGADIDQDGKVKAIYVTDSDDREITFNDNSKRRIGMIRYDVLVDDNGNIRFTGKGKTHKEEGAIYAGLYSLSLGDEVWEDYFKKYPEVQENL

SEQ ID NO: 833 - protein, 317 aa, synthetic construct
TALGRRKAEDRIKETLWADGVKIDEKDFEHIDSSHEDYFAVEYGKGSGYYDVNKKMDSEDTALCVGAVVTNMFHWWVEQNRENIEKFKEQDPENNGVMKFEGVKEATVDELNEFYRDNRDNYADQSRFFDLIKKHFPNKALNPEELFELYFNGFYYGSSHRYIEDNEPAQNNLFSKVLDNNKLLNPERSYGIDGFSNNVKNALKSHKVLGLVYTTPLRYRHIISMWGADIDQDGKVKAIYVTDSDDREITFNDNSKRRIGMIRYDVLVDDNGNIRFTGKGATHKEEGAIYAGLYSLSRGDEVWEDYFKKYPEVQENL

SEQ ID NO: 834 - protein, 317 aa, synthetic construct
TALGRRKAEDRIKETLWADGVKIDEKDFEHIDSSHEDYFAVEYGKGSGYYDVNKKMDSEDTALCVGAVVTNMFHWWVDQNRENIEKFKEQDPENNGVMKFEGVKEATVDELNEFYRDNRDNYADQSRFFDLIKKHFPNKALNPEELFELYFNGFYYGSSHRYIEDNEPAQNNLFSKVLENNKLLNPERSYGIDGFSNNVKNALKSHKVLGLVYTTPLRYRHIISMWGADIDQDGKVKAIYVTDSDDREITFNDNSKRRIGMIRYDVLVDDNGNIRFTGKGKTHKEEGAIYAGLYSLSLGDEVWEDYFKKYPEVQENL

SEQ ID NO: 835 - protein, 317 aa, synthetic construct
TALGRRKAEDRIKETLWADGVKIDEKDFEHIDSSHEDYFAVEYGKGSGYYDVNKKMDSEDTALCVGAVVTNMFHWWVEQNRENIEKFKEQDPENNGVMKFEGVKEATVDELNEFYRDNRDNYADQSRFFDLIKKHFPNKALNPEELFELYFNGFYYGSSHRYIEDNEPAQNNLFSKVLDNNKLLNPERSYGIDGFSNNVKNALKSHKVLGLVYTTPLRYRHIISMWGADIDQDGKVKAIYVTDPDDREITFNDNSKRRIGMIRYDVLVDDNGNIRFTGKGATHKEEGAIYAGLYSLSRGDEVWEDYFKKYPEVQENL

SEQ ID NO: 836 - protein, 317 aa, synthetic construct
TALGRRKAEDRIKETLWADGVKIDEKDFEHIDSSHEDYFAVEYGKGSGYYDVNKKMDSEDTALCVGAVVTNMFHWWVDQNRENIEKFKEQDPENNGVMKFEGVKEATVDELNEFYRDNRDNYADQSRFFDLIKKHFPNKALNPEELFELYFNGFYYGSSHRYIEDNEPAQNNLFSKVLENNKLLNPERSYGIDGFSNNVKNALKSHKVLGLVYTTPLRYRHIISMWGADIDQDGKVKAIYVTDPDDREITFNDNSKRRIGMIRYDVLVDDNGNIRFTGKGKTHKEEGAIYAGLYSLSLGDEVWEDYFKKYPEVQENL

SEQ ID NO: 837 - protein, 317 aa, synthetic construct
TALGRRKAEDRIKETLWADGVKIDEKDFEHIDSSHEDYFAVEYGKGSGYYDVNKKMDSEDTALCVGAVVTNMFHWWVEQNRENIEKFKEQDPENNGVMKFEGVKEATVDELNEFYRDNRDNYADQSRFFDLIKKHFPNKALNPEELFELYFNGFYYGSSHRYIEDNEPAQNNLFSKVLDNNKLLNPERSYGIDGFSNNVKNALKSHKVLGLVYTTPLRYRHIISMWGADIDQDGKVKAIYVTDPDDREITFNDNSKRRIGMIRYDVLVDDNGNIRFTGKGKTHKEEGAIYAGLYSLSLGDEVWEDYFKKYPEVQENL

SEQ ID NO: 838 - protein, 317 aa, synthetic construct
TALGRRKAEDRIKETLWADGVKIDEKDFEHIDSSHEDYFAVEYGKGSGYYDVNKKMDSEDTALCVGAVVTNMFHWWVDQNRENIEKFKEQDPENNGVMKFEGVKEATVDELNEFYRDNRDNYADQSRFFDLIKKHFPNKALNPEELFELYFNGFYYGSSHRYIEDNEPAQNNLFSKVLENNKLLNPERSYGIDGFSNNVKNALKSHKVLGLVYTTPLRYRHIISMWGADIDQDGKVKAIYVTDSDDREITFNDNSKRRIGMIRYDVLVDDEGNIRFTGKGATHKEEGAIYAGLYSLSRGDEVWEDYFKKYPEVQENL

SEQ ID NO: 839 - protein, 317 aa, synthetic construct
TALGRRKAEDRIKETLWADGVKIDEKDFEHIDSSHEDYFAVEYGKGSGYYDVNKKMDSEDTALCVGAVVTNMFHWWVEQNRENIEKFKEQDPENNGVMKFEGVKEATVDELNEFYRDNRDNYADQSRFFDLIKKHFPNKALNPEELFELYFNGFYYGSSHRYIEDNEPAQNNLFSKVLDNNKLLNPERSYGIDGFSNNVKNALKSHKVLGLVYTTPLRYRHIISMWGADIDQDGKVKAIYVTDSDDREITFNDNSKRRIGMIRYDVLVDDEGNIRFTGKGATHKEEGAIYAGLYSLSRGDEVWEDYFKKYPEVQENL

SEQ ID NO: 840 - protein, 317 aa, synthetic construct
TALGRRKAEDRIKETLWADGVKIDEKDFEHIDSSHEDYFAVEYGKGSGYYDVNKKMDSEDTALCVGAVVTNMFHWWVEQNRENIEKFKEQDPENNGVMKFEGVKEATVDELNEFYRDNRDNYADQSRFFDLIKKHFPNKALNPEELFELYFNGFYYGSSHRYIEDNEPAQNNLFSKVLDNNKLLNPERSYGIDGFSNNVKNALKSHKVLGLVYTTPLRYRHIISMWGADIDQDGKVKAIYVTDSDDREITFNDNSKRRIGMIRYDVLVDDEGNIRFTGKGKTHKEEGAIYAGLYSLSLGDEVWEDYFKKYPEVQENL

SEQ ID NO: 841 - protein, 317 aa, synthetic construct
TALGRRKAEDRIKETLWADGVKIDEKDFEHIDSSHEDYFAVEYGKGSGYYDVNKKMDSEDTALCVGAVVTNMFHWWVEQNRENIEKFKEQDPENNGVMKFEGVKEATVDELNEFYRDNRDNYADQSRFFDLIKKHFPNKALNPEELFELYFNGFYYGSSHRYIEDNEPAQNNLFSKVLDNNKLLNPERSYGIDGFSNNVKNALKSHKVLGLVYTTPLRYRHIISMWGADIDQDGKVKAIYVTDPDDREITFNDNSKRRIGMIRYDVLVDDEGNIRFTGKGATHKEEGAIYAGLYSLSRGDEVWEDYFKKYPEVQENL

SEQ ID NO: 842 - protein, 317 aa, synthetic construct
TALGRRKAEDRIKETLWADGVKIDEKDFEHIDSSHEDYFAVEYGKGSGYYDVNKKMDSEDTALCVGAVVTNMFHWWVDQNRENIEKFKEQDPENNGVMKFEGVKEATVDELNEFYRDNRDNYADQSRFFDLIKKHFPNKALNPEELFELYFNGFYYGSSHRYIEDNEPAQNNLFSKVLENNKLLNPERSYGIDGFSNNVKNALKSHKVLGLVYTTPLRYRHIISMWGADIDQDGKVKAIYVTDPDDREITFNDNSKRRIGMIRYDVLVDDEGNIRFTGKGKTHKEEGAIYAGLYSLSLGDEVWEDYFKKYPEVQENL

SEQ ID NO: 843 - protein, 317 aa, synthetic construct
TALGRRKAEDRIKETLWADGVKIDEKDFEHIDSSHEDYFAVEYGKGSGYYDVNKKMDSEDTALCVGAVVTNMFHWWVEQNRENIEKFKEQDPENNGVMKFEGVKEATVDELNEFYRDNRDNYADQSRFFDLIKKHFPNKALNPEELFELYFNGFYYGSSHRYIEDNEPAQNNLFSKVLDNNKLLNPERSYGIDGFSNNVKNALKSHKVLGLVYTTPLRYRHIISMWGADIDQDGKVKAIYVTDPDDREITFNDNSKRRIGMIRYDVLVDDEGNIRFTGKGKTHKEEGAIYAGLYSLSLGDEVWEDYFKKYPEVQENL

SEQ ID NO: 844 - protein, 317 aa, synthetic construct
TALGRRKAEDRIKETLWADGVKIDEKDFEHIKSSHEDYFAVEYGKGSGYYDVNKKMDSEDTALCVGAVVTNMFHWWVDQNRENIEKFKKQDPENNGVMKFEGVKEATVDELNEFYRDNRDNYADQSRFFDLIKKDFGNKALNPEELFELYFNGFYYGSSHRYIEDNEPAQNNLFSKVLENNKLLNPERSYGIDGFSNNVKNALKSHKVLGLVYTTPLRYRHIISMWGADIDQDGKVKAIYVTDSDDREITFNDNSKRRIGMIRYDVLVDDNGNIRFTGKGATHKEEGAIYAGLYSLSRGDEVWEDYFKKYPEVQENL

SEQ ID NO: 845 - protein, 317 aa, synthetic construct
TALGRRKAEDRIKETLWADGVKIDEKDFEHIKSSHEDYFAVEYGKGSGYYDVNKKMDSEDTALCVGAVVTNMFHWWVEQNRENIEKFKKQDPENNGVMKFEGVKEATVDELNEFYRDNRDNYADQSRFFDLIKKDFGNKALNPEELFELYFNGFYYGSSHRYIEDNEPAQNNLFSKVLDNNKLLNPERSYGIDGFSNNVKNALKSHKVLGLVYTTPLRYRHIISMWGADIDQDGKVKAIYVTDSDDREITFNDNSKRRIGMIRYDVLVDDNGNIRFTGKGATHKEEGAIYAGLYSLSRGDEVWEDYFKKYPEVQENL

SEQ ID NO: 846 - protein, 317 aa, synthetic construct
TALGRRKAEDRIKETLWADGVKIDEKDFEHIKSSHEDYFAVEYGKGSGYYDVNKKMDSEDTALCVGAVVTNMFHWWVDQNRENIEKFKKQDPENNGVMKFEGVKEATVDELNEFYRDNRDNYADQSRFFDLIKKDFGNKALNPEELFELYFNGFYYGSSHRYIEDNEPAQNNLFSKVLENNKLLNPERSYGIDGFSNNVKNALKSHKVLGLVYTTPLRYRHIISMWGADIDQDGKVKAIYVTDSDDREITFNDNSKRRIGMIRYDVLVDDNGNIRFTGKGKTHKEEGAIYAGLYSLSLGDEVWEDYFKKYPEVQENL

SEQ ID NO: 847 - protein, 317 aa, synthetic construct
TALGRRKAEDRIKETLWADGVKIDEKDFEHIKSSHEDYFAVEYGKGSGYYDVNKKMDSEDTALCVGAVVTNMFHWWVEQNRENIEKFKKQDPENNGVMKFEGVKEATVDELNEFYRDNRDNYADQSRFFDLIKKDFGNKALNPEELFELYFNGFYYGSSHRYIEDNEPAQNNLFSKVLDNNKLLNPERSYGIDGFSNNVKNALKSHKVLGLVYTTPLRYRHIISMWGADIDQDGKVKAIYVTDSDDREITFNDNSKRRIGMIRYDVLVDDNGNIRFTGKGKTHKEEGAIYAGLYSLSLGDEVWEDYFKKYPEVQENL

SEQ ID NO: 848 - protein, 317 aa, synthetic construct
TALGRRKAEDRIKETLWADGVKIDEKDFEHIDSSHEDYFAVEYGKGSGYYDVNKKMDSEDTALCVGAVVTNMFHWWVEQNRENIEKFKEQDPENNGVMKFEGVKEATVDELNEFYRDNRDNYADQSRFFDLIKKDFGNKALNPEELFELYFNGFYYGSSHRYIEDNEPAQNNLFSKVLDNNKLLNPERSYGIDGFSNNVKNALKSHKVLGLVYTTPLRYRHIISMWGADIDQDGKVKAIYVTDSDDREITFNDNSKRRIGMIRYDVLVDDNGNIRFTGKGATHKEEGAIYAGLYSLSRGDEVWEDYFKKYPEVQENL

SEQ ID NO: 849 - protein, 317 aa, synthetic construct
TALGRRKAEDRIKETLWADGVKIDEKDFEHIDSSHEDYFAVEYGKGSGYYDVNKKMDSEDTALCVGAVVTNMFHWWVDQNRENIEKFKEQDPENNGVMKFEGVKEATVDELNEFYRDNRDNYADQSRFFDLIKKDFGNKALNPEELFELYFNGFYYGSSHRYIEDNEPAQNNLFSKVLENNKLLNPERSYGIDGFSNNVKNALKSHKVLGLVYTTPLRYRHIISMWGADIDQDGKVKAIYVTDSDDREITFNDNSKRRIGMIRYDVLVDDNGNIRFTGKGKTHKEEGAIYAGLYSLSLGDEVWEDYFKKYPEVQENL

SEQ ID NO: 850 - protein, 317 aa, synthetic construct
TALGRRKAEDRIKETLWADGVKIDEKDFEHIDSSHEDYFAVEYGKGSGYYDVNKKMDSEDTALCVGAVVTNMFHWWVEQNRENIEKFKEQDPENNGVMKFEGVKEATVDELNEFYRDNRDNYADQSRFFDLIKKDFGNKALNPEELFELYFNGFYYGSSHRYIEDNEPAQNNLFSKVLDNNKLLNPERSYGIDGFSNNVKNALKSHKVLGLVYTTPLRYRHIISMWGADIDQDGKVKAIYVTDPDDREITFNDNSKRRIGMIRYDVLVDDNGNIRFTGKGATHKEEGAIYAGLYSLSRGDEVWEDYFKKYPEVQENL

SEQ ID NO: 851 - protein, 317 aa, synthetic construct
TALGRRKAEDRIKETLWADGVKIDEKDFEHIDSSHEDYFAVEYGKGSGYYDVNKKMDSEDTALCVGAVVTNMFHWWVDQNRENIEKFKEQDPENNGVMKFEGVKEATVDELNEFYRDNRDNYADQSRFFDLIKKDFGNKALNPEELFELYFNGFYYGSSHRYIEDNEPAQNNLFSKVLENNKLLNPERSYGIDGFSNNVKNALKSHKVLGLVYTTPLRYRHIISMWGADIDQDGKVKAIYVTDPDDREITFNDNSKRRIGMIRYDVLVDDNGNIRFTGKGKTHKEEGAIYAGLYSLSLGDEVWEDYFKKYPEVQENL

SEQ ID NO: 852 - protein, 317 aa, synthetic construct
TALGRRKAEDRIKETLWADGVKIDEKDFEHIDSSHEDYFAVEYGKGSGYYDVNKKMDSEDTALCVGAVVTNMFHWWVEQNRENIEKFKEQDPENNGVMKFEGVKEATVDELNEFYRDNRDNYADQSRFFDLIKKDFGNKALNPEELFELYFNGFYYGSSHRYIEDNEPAQNNLFSKVLDNNKLLNPERSYGIDGFSNNVKNALKSHKVLGLVYTTPLRYRHIISMWGADIDQDGKVKAIYVTDPDDREITFNDNSKRRIGMIRYDVLVDDNGNIRFTGKGKTHKEEGAIYAGLYSLSLGDEVWEDYFKKYPEVQENL

SEQ ID NO: 853 - protein, 317 aa, synthetic construct
TALGRRKAEDRIKETLWADGVKIDEKDFEHIDSSHEDYFAVEYGKGSGYYDVNKKMDSEDTALCVGAVVTNMFHWWVDQNRENIEKFKEQDPENNGVMKFEGVKEATVDELNEFYRDNRDNYADQSRFFDLIKKDFGNKALNPEELFELYFNGFYYGSSHRYIEDNEPAQNNLFSKVLENNKLLNPERSYGIDGFSNNVKNALKSHKVLGLVYTTPLRYRHIISMWGADIDQDGKVKAIYVTDSDDREITFNDNSKRRIGMIRYDVLVDDEGNIRFTGKGATHKEEGAIYAGLYSLSRGDEVWEDYFKKYPEVQENL

SEQ ID NO: 854 - protein, 317 aa, synthetic construct
TALGRRKAEDRIKETLWADGVKIDEKDFEHIDSSHEDYFAVEYGKGSGYYDVNKKMDSEDTALCVGAVVTNMFHWWVEQNRENIEKFKEQDPENNGVMKFEGVKEATVDELNEFYRDNRDNYADQSRFFDLIKKDFGNKALNPEELFELYFNGFYYGSSHRYIEDNEPAQNNLFSKVLDNNKLLNPERSYGIDGFSNNVKNALKSHKVLGLVYTTPLRYRHIISMWGADIDQDGKVKAIYVTDSDDREITFNDNSKRRIGMIRYDVLVDDEGNIRFTGKGATHKEEGAIYAGLYSLSRGDEVWEDYFKKYPEVQENL

SEQ ID NO: 855 - protein, 317 aa, synthetic construct
TALGRRKAEDRIKETLWADGVKIDEKDFEHIDSSHEDYFAVEYGKGSGYYDVNKKMDSEDTALCVGAVVTNMFHWWVEQNRENIEKFKEQDPENNGVMKFEGVKEATVDELNEFYRDNRDNYADQSRFFDLIKKDFGNKALNPEELFELYFNGFYYGSSHRYIEDNEPAQNNLFSKVLDNNKLLNPERSYGIDGFSNNVKNALKSHKVLGLVYTTPLRYRHIISMWGADIDQDGKVKAIYVTDSDDREITFNDNSKRRIGMIRYDVLVDDEGNIRFTGKGKTHKEEGAIYAGLYSLSLGDEVWEDYFKKYPEVQENL

SEQ ID NO: 856 - protein, 317 aa, synthetic construct
TALGRRKAEDRIKETLWADGVKIDEKDFEHIDSSHEDYFAVEYGKGSGYYDVNKKMDSEDTALCVGAVVTNMFHWWVEQNRENIEKFKEQDPENNGVMKFEGVKEATVDELNEFYRDNRDNYADQSRFFDLIKKDFGNKALNPEELFELYFNGFYYGSSHRYIEDNEPAQNNLFSKVLDNNKLLNPERSYGIDGFSNNVKNALKSHKVLGLVYTTPLRYRHIISMWGADIDQDGKVKAIYVTDPDDREITFNDNSKRRIGMIRYDVLVDDEGNIRFTGKGATHKEEGAIYAGLYSLSRGDEVWEDYFKKYPEVQENL

SEQ ID NO: 857 - protein, 317 aa, synthetic construct
TALGRRKAEDRIKETLWADGVKIDEKDFEHIDSSHEDYFAVEYGKGSGYYDVNKKMDSEDTALCVGAVVTNMFHWWVDQNRENIEKFKEQDPENNGVMKFEGVKEATVDELNEFYRDNRDNYADQSRFFDLIKKDFGNKALNPEELFELYFNGFYYGSSHRYIEDNEPAQNNLFSKVLENNKLLNPERSYGIDGFSNNVKNALKSHKVLGLVYTTPLRYRHIISMWGADIDQDGKVKAIYVTDPDDREITFNDNSKRRIGMIRYDVLVDDEGNIRFTGKGKTHKEEGAIYAGLYSLSLGDEVWEDYFKKYPEVQENL

SEQ ID NO: 858 - protein, 317 aa, synthetic construct
TALGRRKAEDRIKETLWADGVKIDEKDFEHIDSSHEDYFAVEYGKGSGYYDVNKKMDSEDTALCVGAVVTNMFHWWVEQNRENIEKFKEQDPENNGVMKFEGVKEATVDELNEFYRDNRDNYADQSRFFDLIKKDFGNKALNPEELFELYFNGFYYGSSHRYIEDNEPAQNNLFSKVLDNNKLLNPERSYGIDGFSNNVKNALKSHKVLGLVYTTPLRYRHIISMWGADIDQDGKVKAIYVTDPDDREITFNDNSKRRIGMIRYDVLVDDEGNIRFTGKGKTHKEEGAIYAGLYSLSLGDEVWEDYFKKYPEVQENL

SEQ ID NO: 859 - protein, 317 aa, synthetic construct
TALGRRKAEDRIKETLWADGVKIDEKDFEHIDSSHEDYFAVEYGKGSGYYDVNKKMDSEDTALCVGAVVTNMFHWWVDQNRENIEKFKEQDPENNGVMKFEGVKEATVDELNEFYRDNRDNYADQSRFFDLIKKHFPNKALNPEELFELYFNGFYYGSSHRYIEDNEPAQNNLFSKVLENNKLLNPERSYGIDGFSNNVINALKSHKVLGLVYTTPLRYRHIISMWGADIDQDGKVKAIYVTDSDDREITFNDNSKRRIGMIRYDVLVDDNGNIRFTGKGATHKEEGAIYAGLYSLSRGDEVWEDYFKKYPEVQENL

SEQ ID NO: 860 - protein, 317 aa, synthetic construct
TALGRRKAEDRIKETLWADGVKIDEKDFEHIKSSHEDYFAVEYGKGSGYYDVNKKMDSEDTALCVGAVVTNMFHWWVEQNRENIEKFKKQDPENNGVMKFEGVKEATVDELNEFYRDNRDNYADQSRFFDLIKKHFPNKALNPEELFELYFNGFYYGSSHRYIEDNEPAQNNLFSKVLDNNKLLNPERSYGIDGFSNNVINALKSHKVLGLVYTTPLRYRHIISMWGADIDQDGKVKAIYVTDSDDREITFNDNSKRRIGMIRYDVLVDDNGNIRFTGKGATHKEEGAIYAGLYSLSRGDEVWEDYFKKYPEVQENL

SEQ ID NO: 861 - protein, 317 aa, synthetic construct
TALGRRKAEDRIKETLWADGVKIDEKDFEHIKSSHEDYFAVEYGKGSGYYDVNKKMDSEDTALCVGAVVTNMFHWWVDQNRENIEKFKKQDPENNGVMKFEGVKEATVDELNEFYRDNRDNYADQSRFFDLIKKHFPNKALNPEELFELYFNGFYYGSSHRYIEDNEPAQNNLFSKVLENNKLLNPERSYGIDGFSNNVINALKSHKVLGLVYTTPLRYRHIISMWGADIDQDGKVKAIYVTDSDDREITFNDNSKRRIGMIRYDVLVDDNGNIRFTGKGKTHKEEGAIYAGLYSLSLGDEVWEDYFKKYPEVQENL

SEQ ID NO: 862 - protein, 317 aa, synthetic construct
TALGRRKAEDRIKETLWADGVKIDEKDFEHIKSSHEDYFAVEYGKGSGYYDVNKKMDSEDTALCVGAVVTNMFHWWVEQNRENIEKFKKQDPENNGVMKFEGVKEATVDELNEFYRDNRDNYADQSRFFDLIKKHFPNKALNPEELFELYFNGFYYGSSHRYIEDNEPAQNNLFSKVLDNNKLLNPERSYGIDGFSNNVINALKSHKVLGLVYTTPLRYRHIISMWGADIDQDGKVKAIYVTDSDDREITFNDNSKRRIGMIRYDVLVDDNGNIRFTGKGKTHKEEGAIYAGLYSLSLGDEVWEDYFKKYPEVQENL

SEQ ID NO: 863 - protein, 317 aa, synthetic construct
TALGRRKAEDRIKETLWADGVKIDEKDFEHIDSSHEDYFAVEYGKGSGYYDVNKKMDSEDTALCVGAVVTNMFHWWVEQNRENIEKFKEQDPENNGVMKFEGVKEATVDELNEFYRDNRDNYADQSRFFDLIKKHFPNKALNPEELFELYFNGFYYGSSHRYIEDNEPAQNNLFSKVLDNNKLLNPERSYGIDGFSNNVINALKSHKVLGLVYTTPLRYRHIISMWGADIDQDGKVKAIYVTDSDDREITFNDNSKRRIGMIRYDVLVDDNGNIRFTGKGATHKEEGAIYAGLYSLSRGDEVWEDYFKKYPEVQENL

SEQ ID NO: 864 - protein, 317 aa, synthetic construct
TALGRRKAEDRIKETLWADGVKIDEKDFEHIDSSHEDYFAVEYGKGSGYYDVNKKMDSEDTALCVGAVVTNMFHWWVDQNRENIEKFKEQDPENNGVMKFEGVKEATVDELNEFYRDNRDNYADQSRFFDLIKKHFPNKALNPEELFELYFNGFYYGSSHRYIEDNEPAQNNLFSKVLENNKLLNPERSYGIDGFSNNVINALKSHKVLGLVYTTPLRYRHIISMWGADIDQDGKVKAIYVTDSDDREITFNDNSKRRIGMIRYDVLVDDNGNIRFTGKGKTHKEEGAIYAGLYSLSLGDEVWEDYFKKYPEVQENL

SEQ ID NO: 865-884 - skipped (20 entries)

SEQ ID NO: 885 - protein, 317 aa, synthetic construct
TALGRRKAEDRIKETLWADGVKIDEKDFEHIKSSHEDYFAVEYGKGSGYYDVNKKMDSEDTALCVGAVVTNMFHWWVDQNRENIEKFKKQDPENNGVMKFEGVKEATVDELNHFYRDNRDNYADQSRFFDLIKKHFGNKALNPEELFELYFNGFYYGSSHRYIEDNEPAQNNLFSKVLDNNKLLNPERSYGIDGFSNNVINALKSHKVLGLVYTTPLRYRHIISMWGADIDQDGKVKAIYVTDSDDREITFNDNSKRRIGMIRYDVLVDDNGNIRFTGKGATHKEEGAIYAGLYSLSRGDEVWEDYFKKYPEVQENL

SEQ ID NO: 886 - protein, 317 aa, synthetic construct
TALGRRKAEDRIKETLWADGVKIDEKDFEHIKSSHEDYFAVEYGKGSGYYDVNKKMDSEDTALCVGAVVTNMFHWWVDQNRENIEKFKKQDPENNGVMKFEGVKEATVDELNHFYRDNRDNYADQSRFFDLIKKHFGNKALNPEELFELYFNGFYYGSSHRYIEDNEPAQNNLFSKVLENNKLLNPERSYGIDGFSNNVINALKSHKVLGLVYTTPLRYRHIISMWGADIDQDGKVKAIYVTDSDDREITFNDNSKRRIGMIRYDVLVDDNGNIRFTGKGKTHKEEGAIYAGLYSLSRGDEVWEDYFKKYPEVQENL

SEQ ID NO: 887 - protein, 317 aa, synthetic construct
TALGRRKAEDRIKETLWADGVKIDEKDFEHIKSSHEDYFAVEYGKGSGYYDVNKKMDSEDTALCVGAVVTNMFHWWVDQNRENIEKFKKQDPENNGVMKFEGVKEATVDELNHFYRDNRDNYADQSRFFDLIKKHFGNKALNPEELFELYFNGFYYGSSHRYIEDNEPAQNNLFSKVLENNKLLNPERSYGIDGFSNNVINALKSHKVLGLVYTTPLRYRHIISMWGADIDQDGKVKAIYVTDSDDREITFNDNSKRRIGMIRYDVLVDDEGNIRFTGKGATHKEEGAIYAGLYSLSRGDEVWEDYFKKYPEVQENL

SEQ ID NO: 888 - protein, 317 aa, synthetic construct
TALGRRKAEDRIKETLWADGVKIDEKDFEHIKSSHEDYFAVEYGKGSGYYDVNKKMDSEDTALCVGAVVTNMFHWWVDQNRENIEKFKKQDPENNGVMKFEGVKEATVDELNHFYRDNRDNYADQSRFFDLIKKHFGNKALNPEELFELYFNGFYYGSSHRYIEDNEPAQNNLFSKVLENNKLLNPERSYGIDGFSNNVINALKSHKVLGLVYTTPLRYGHIISMWGADIDQDGKVKAIYVTDSDDREITFNDNSKRRIGMIRYDVLVDDNGNIRFTGKGATHKEEGAIYAGLYSLSRGDEVWEDYFKKYPEVQENL

SEQ ID NO: 889 - protein, 317 aa, synthetic construct
TALGRRKAEDRIKETLWADGVKIDEKDFEHIKSSHEDYFAVEYGKGSGYYDVNKKMDSEDTALCVGAVVTNMFHWWVDQNRENIEKFKKQDPENNGVMKFEGVKEATVDELNHFYRDNRDNYADQSRFFDLIKKDFGNKALNPEELFELYFNGFYYGSSHRYIEDNEPAQNNLFSKVLENNKLLNPERSYGIDGFSNNVINALKSHKVLGLVYTTPLRYRHIISMWGADIDQDGKVKAIYVTDSDDREITFNDNSKRRIGMIRYDVLVDDNGNIRFTGKGATHKEEGAIYAGLYSLSRGDEVWEDYFKKYPEVQENL

SEQ ID NO: 890 - protein, 317 aa, synthetic construct
TALGRRKAEDRIKETLWADGVKIDEKDFEHIKSSHEDYFAVEYGKGSGYYDVNKKMDSEDTALCVGAVVTNMFHWWVDQNRENIEKFKKQDPENNGVMKFEGVKEATVDELNHFYRDNRDNYADQSRFFDLIKKHFGNKALNPEELFELYFNGFYYGSSHRYIEDNEPAQNNLFSKVLENNKLLNPERSYGIDGFSNNVINALKSHKVLGLVYTTPLRYRHIISMWGADIDQDGKVKAIYVTDSDDREITFNDNSKRRIGMIRYDVLVDDNGNIRFTGKGATHKEEGAIYAGLYSLSLGDEVWEDYFKKYPEVQENL

SEQ ID NO: 891 - protein, 317 aa, synthetic construct
TALGRRKAEDRIKETLWADGVKIDEKDFEHIKSSHEDYFAVEYGKGSGYYDVNKKMDSEDTALCVGAVVTNMFHWWVDQNRENIEKFKKQDPENNGVMKFEGVKEATVDELNHFYRDNRDNYADQSRFFDLIKKHFGNKALNPEELFELYFNGFYYGSSHRYIEDNEPAQNNLFSKVLENNKLLNPERSYGIDGFSNNVKNALKSHKVLGLVYTTPLRYRHIISMWGADIDQDGKVKAIYVTDSDDREITFNDNSKRRIGMIRYDVLVDDNGNIRFTGKGATHKEEGAIYAGLYSLSRGDEVWEDYFKKYPEVQENL

SEQ ID NO: 892 - protein, 317 aa, synthetic construct
TALGRRKAEDRIKETLWADGVKIDEKDFEHIKSSHEDYFAVEYGKGSGYYDVNKKMDSEDTALCVGAVVTNMFHWWVDQNRENIEKFKKQDPENNGVMKFEGVKEATVDELNHFYRDNRDNYADQSRFFDLIKKHFPNKALNPEELFELYFNGFYYGSSHRYIEDNEPAQNNLFSKVLENNKLLNPERSYGIDGFSNNVINALKSHKVLGLVYTTPLRYRHIISMWGADIDQDGKVKAIYVTDSDDREITFNDNSKRRIGMIRYDVLVDDNGNIRFTGKGATHKEEGAIYAGLYSLSRGDEVWEDYFKKYPEVQENL

SEQ ID NO: 893 - protein, 317 aa, synthetic construct
TALGRRKAEDRIKETLWADGVKIDEKDFEHIKSSHEDYFAVEYGKGSGYYDVNKKMDSEDTALCVGAVVTNMFHWWVDQNRENIEKFKKQDPENNGVMKFEGVKEATVDELNHFYRDNRDNYADQSRFFDLIKKHFGNKALNPEELFELYFNGFYYGSSHRYIEDNEPAQNNLFSKVLENNKLLNPERSYGIDGFSNNVINALKSHKVLGLVYTTPLRSRHIISMWGADIDQDGKVKAIYVTDSDDREITFNDNSKRRIGMIRYDVLVDDNGNIRFTGKGATHKEEGAIYAGLYSLSRGDEVWEDYFKKYPEVQENL

SEQ ID NO: 894 - protein, 317 aa, synthetic construct
TALGRRKAEDRIKETLWADGVKIDEKDFEHIDSSHEDYFAVEYGKGSGYYDVNKKMDSEDTALCVGAVVTNMFHWWVDQNRENIEKFKKQDPENNGVMKFEGVKEATVDELNHFYRDNRDNYADQSRFFDLIKKHFGNKALNPEELFELYFNGFYYGSSHRYIEDNEPAQNNLFSKVLENNKLLNPERSYGIDGFSNNVINALKSHKVLGLVYTTPLRYRHIISMWGADIDQDGKVKAIYVTDSDDREITFNDNSKRRIGMIRYDVLVDDNGNIRFTGKGATHKEEGAIYAGLYSLSRGDEVWEDYFKKYPEVQENL

SEQ ID NO: 895 - protein, 317 aa, synthetic construct
TALGRRKAEDRIKETLWADGVKIDEKDFEHIKSSHEDYFAVEYGKGSGYYDVNKKMDSEDTALCVGAVVTNMFHWWVDQNRENIEKFKKQDPENNGVMKFEGVKEATVDELNHFYRDNRDNYADQSRFFDLIKKHFGNKALNPEELFELYFNGFYYGSSHRYIEDNEPAQNNLFSKVLENNKLLNPERSYGIDGFSNNVINALKSHKVLGLVYTTPLRYRHIISMWGADIDQDGKVKAIYVTDPDDREITFNDNSKRRIGMIRYDVLVDDNGNIRFTGKGATHKEEGAIYAGLYSLSRGDEVWEDYFKKYPEVQENL

SEQ ID NO: 896 - protein, 317 aa, synthetic construct
TALGRRKAEDRIKETLWADGVKIDEKDFEHIKSSHEDYFAVEYGKGSGYYDVNKKMDSEDTALCVGAVVTNMFHWWVDQNRENIEKFKEQDPENNGVMKFEGVKEATVDELNHFYRDNRDNYADQSRFFDLIKKHFGNKALNPEELFELYFNGFYYGSSHRYIEDNEPAQNNLFSKVLENNKLLNPERSYGIDGFSNNVINALKSHKVLGLVYTTPLRYRHIISMWGADIDQDGKVKAIYVTDSDDREITFNDNSKRRIGMIRYDVLVDDNGNIRFTGKGATHKEEGAIYAGLYSLSRGDEVWEDYFKKYPEVQENL

SEQ ID NO: 897 - protein, 317 aa, synthetic construct
TALGRRKAEDRIKETLWADGVKIDEKDFEHIKSSHEDYFAVEYGKGSGYYDVNKKMDSEDTALCVGAVVTNMFHWWVDQNRENIEKFKKQDPENNGVMKFEGVKEATVDELNEFYRDNRDNYADQSRFFDLIKSHFGNKALNPEELFELYFNGFYYGSSHRYIEDNEPAQNNLFSKVLENNKLLNPERSYGIDGFSNNVINALKSHKVLGLVYTTPLRYRHIISMWGADIDQDGKVKAIYVTDSDDREITFNDNSARRIGMIRYDVLVDDNGNIRFTGKGATHKEEGAIYAGLYSLSRGDEVWEDYFKKYPEVQENL

SEQ ID NO: 898 - protein, 317 aa, synthetic construct
TALGRRKAEDRIKETLWADGVKIDEKDFEHIKSSHEDYFAVEYGKGSGYYDVNKKMDSEDTALCVGAVVTNMFHWWVDQNRENIEKFKKQDPENNGVMKFEGVKEATVDELNEFYRDNRDNYADQSRFFDLIKKHFGNKALNPEELFELYFNGFYYGSSQRYIEDNEPAQNNLFSKVLENNKLLNPERSYGIDGFSNNVINALKSHKVLGLVYTTPLEYRHIISMWGADIDQDGKVKAIYVTDSDDREITFNDNSKRRIGMIRYDVLVDDNGNIRFTGKGATHKEEGAIYAGLYSLSRGDEVWEDYFKKYPEVQENL

SEQ ID NO: 899 - protein, 317 aa, synthetic construct
TALGRRKAEDRIKETLWADGVKIDEKDFEHIKSSHEDYFAVEYGKGSGYYDVNKKMDSEDTALCVGAVVTNMFHWWVDQNRENIEKFKKQDPENNGVMKFEGVKEATVDELNEFYRDNRDNYADQSRFFDLIKSHFGNKALNPEELFELYFNGFYYGSSQRYIEDNEPAQNNLFSKVLENNKLLNPERSYGIDGFSNNVINALKSHKVLGLVYTTPLEYRHIISMWGADIDQDGKVKAIYVTDSDDREITFNDNSARRIGMIRYDVLVDDNGNIRFTGKGATHKEEGAIYAGLYSLSRGDEVWEDYFKKYPEVQENL

SEQ ID NO: 900 - protein, 317 aa, synthetic construct
TALGRRKAEDRIKETLWADGVKIDEKDFEHIKSSHEDYFAVEYGKGSGYYDVNKKMDSEDTALCVGAVVTNMFHWWVDQNRENIEKFKKQDPENNGVMKFEGVKEATVDELNEFYRDNRDNYADQSRFFDLIKKHFGNKALNPEELFELYFNGFYYGSSHRYIEDNEPAQNNLFSKVLENNKLLNPERSYGIDGFSNNVINALKSHKVLGLVYTTPLRYRHIISMWGADIDQDGKVKAIYVTDSDDREITFNDNSKRRIGMIRYDVLVDKNGNIRFTGKGATHKEEGAIYAGLYSLSRGDEVWEDYFKKYPEVQENL

SEQ ID NO: 901 - protein, 317 aa, synthetic construct
TALGRRKAEDRIKETLWADGVKIDEKDFEHIKSSHEDYFAVEYGKGSGYYDVNKKMDSEDTALCVGAVVTNMFHWWVDQNRENIEKFKKQDPENNGVMKFEGVKEATVDELNEFYRDNRDNYADQSRFFDLIKKHFGNKALNPEELFELYFNGFYYGSSHRYIEDNEPAQGNLFSKVLENNKLLNPERSYGIDGFSNNVINALKSHKVLGLVYTTPLRYRHIISMWGADIDQDGKVKAIYVTDSDDREITFNDNSKRRIGMIRYDVLVDDNGNIRFTGKGATHKEEGAIYAGLYSLSRGDEVWEDYFKKYPEVQENL

SEQ ID NO: 902 - protein, 317 aa, synthetic construct
TALGRRKAEDRIKETLWADGVKIDEKDFEHIKSSHEDYFAVEYGKGSGYYDVNKKMDSEDTALCVGAVVTNMFHWWVDQNRENIEKFKKQDPENNGVMKFEGVKEATVDELNEFYRDNRDNYADQSRFFDLIKKHFGNKALNPEELFELYFNGFYYGSSHRYIEDNEPAQNNLFSKVLENNKLLNPERSYGRDGFSNNVINALKSHKVLGLVYTTPLRYRHIISMWGADIDQDGKVKAIYVTDSDDREITFNDNSKRRIGMIRYDVLVDDNGNIRFTGKGATHKEEGAIYAGLYSLSRGDEVWEDYFKKYPEVQENL

SEQ ID NO: 903 - protein, 317 aa, synthetic construct
TALGRRKAEDRIKETLWADGVKIDEKDFEHIKSSHEDYFAVEYGKGSGYYDVNKKMDSEDTALCVGAVVTNMFHWWVDQNRENIEKFKKQDPENNGVMKFEGVKEATVDELNEFYRDNRDNYADQSRFFDLIKKHFGNKALNPEELFELYFNGFYYGSSHRYIEDNEPAQNNLFSKVLENNKLLNPERSYGIDGFSNNVINALKSHKVLGLVYTTPLRYRHIISMWGADIDQDGKVKAIYVTDSDDREITFNDNSKRRIGMIRYDVLVDDNGNIRFTGKGATHKEEGAIYAGLYSLSRGDKVWEDYFKKYPEVQENL

SEQ ID NO: 904 - protein, 317 aa, synthetic construct
TALGRRKAEDRIKETLWADGVKIDEKDFEHIKSSHEDYFAVEYGKGSGYYDVNKKMDSEDTALCVGAVVTNMFHWWVDQNRENIEKFKKQDPENNGVMKFEGVKEATVDELNEFYRDNRDNYADQSRFFDLIKKHFGNKALNPEELFELYFNGFYYGSSHRYIEDNEPAQNNLFSKVLENNKLLNPERSYGIDGFSNNVINALKSHKVLGLVYTTPLRYRHIISMWGADIDQDGKVKAIYVTDSDDREITFNDNSKRRIGMIRYDVLVDDNGNIRFTGKGATHKEEGAIYAGLYSLSRGDEVWKDYFKKYPEVQENL

SEQ ID NO: 905 - protein, 317 aa, synthetic construct
TALGRRKAEDRIKETLWADGVKIDEKDFEHIKSSHEDYFAVEYGKGSGYYDVNKKMDSEDTALCVGAVVTNMFHWWVDQNRENIEKFKKQDPENNGVMKFEGVKEATVDELNEFYRDNRDNYADQSRFFDLIKKHFGNKALNPEELFELYFNGFYYGSSHRYIEDNEPAQNNLFSKVLENNKLLNPERSYGIDGFSNNVINALKSHKVLGLVYTTPLRYRHIISMWGADIDQDGKVKAIYVTDSDDREITFNDNSKRRIGMIRYDVLVDDNGNIRFTGKGATHKNEGAIYAGLYSLSRGDEVWEDYFKKYPEVQENL

SEQ ID NO: 906 - protein, 317 aa, synthetic construct
TALGRRKAEDRIKETLWADGVKIDEKDFEHIKSSHEDYFAVEYGKGSGYYDVNKKMDSEDSALCVGAVVTNMFHWWVDQNRENIEKFKKQDPENNGVMKFEGVKEATVDELNEFYRDNRDNYADQSRFFDLIKSHFGNKALNPEELFELYFNGFYYGSSHRYIEDNEPAQNNLFSKVLENNKLLNPERSYGIDGFSNNVINALKSHKVLGLVYTTPLRYRHIISMWGADIDQDGKVKAIYVTDSDDREITFNDNSARRIGMIRYDVLVDDNGNIRFTGKGATHKEEGAIYAGLYSLSRGDEVWEDYFKKYPEVQENL

SEQ ID NO: 907 - protein, 317 aa, synthetic construct
TALGRRKAEDRIKETLWADGVKIDEKDFEHIKSSHEDYFAVEYGKGSGYYDVNKKMDSEDSALCVGAVVTNMFHWWVDQNRENIEKFKKQDPENNGVMKFEGVKEATVDELNEFYRDNRDNYADQSRFFDLIKKHFGNKALNPEELFELYFNGFYYGSSQRYIEDNEPAQNNLFSKVLENNKLLNPERSYGIDGFSNNVINALKSHKVLGLVYTTPLEYRHIISMWGADIDQDGKVKAIYVTDSDDREITFNDNSKRRIGMIRYDVLVDDNGNIRFTGKGATHKEEGAIYAGLYSLSRGDEVWEDYFKKYPEVQENL

SEQ ID NO: 908 - protein, 317 aa, synthetic construct
TALGRRKAEDRIKETLWADGVKIDEKDFEHIKSSHEDYFAVEYGKGSGYYDVNKKMDSEDSALCVGAVVTNMFHWWVDQNRENIEKFKKQDPENNGVMKFEGVKEATVDELNEFYRDNRDNYADQSRFFDLIKSHFGNKALNPEELFELYFNGFYYGSSQRYIEDNEPAQNNLFSKVLENNKLLNPERSYGIDGFSNNVINALKSHKVLGLVYTTPLEYRHIISMWGADIDQDGKVKAIYVTDSDDREITFNDNSARRIGMIRYDVLVDDNGNIRFTGKGATHKEEGAIYAGLYSLSRGDEVWEDYFKKYPEVQENL

SEQ ID NO: 909 - protein, 317 aa, synthetic construct
TALGRRKAEDRIKETLWADGVKIDEKDFEHIKSSHEDYFAVEYGKGSGYYDVNKKMDSEDTALCVGAVVTNMFHWWVDQNRENIEKFKKQDPENNGVMKFEGVKEATVDELNEFYRDNRDNYADQSRFFDLIKKHFGNKALNPEELFELYFNGFYYGSSHRYIEDNEPAQNNLFSKVLENNKLLNPERSYGIDGFSNNVINALKSHKVLGLVYTTPLRYRHIISMWGADIDQDGKVKAIYVTDSDDREITFNDNSKRRIGMIRYDVLVDDNGNIRFTGKGATHKEEGAIYAGLYSLSRGDKVWKDYFKKYPEVQENL

SEQ ID NO: 910 - protein, 317 aa, synthetic construct
TALGRRKAEDRIKETLWADGVKIDEKDFEHIKSSHEDYFAVEYGKGSGYYDVNKKMDSEDTALCVGAVVTNMFHWWVDQNRENIEKFKKQDPENNGVMKFEGVKEATVDELNEFYRDNRDNYADQSRFFDLIKKHFGNKALNPEELFELYFNGFYYGSSHRYIEDNEPAQNNLFSKVLENNKLLNPERSYGIDGFSNNVINALKSHKVLGLVYTTPLRYRHIISMWGADIDQDGKVKAIYVTDSDDREITFNDNSKRRIGMIRYDVLVDKNGNIRFTGKGATHKNEGAIYAGLYSLSRGDEVWEDYFKKYPEVQENL

SEQ ID NO: 911 - protein, 317 aa, synthetic construct
TALGRRKAEDRIKETLWADGVKIDEKDFEHIKSSHEDYFAVEYGKGSGYYDVNKKMDSEDTALCVGAVVTNMFHWWVDQNRENIEKFKKQDPENNGVMKFEGVKEATVDELNEFYRDNRDNYADQSRFFDLIKKHFGNKALNPEELFELYFNGFYYGSSHRYIEDNEPAQNNLFSKVLENNKLLNPERSYGRDGFSNNVINALKSHKVLGLVYTTPLRYRHIISMWGADIDQDGKVKAIYVTDSDDREITFNDNSKRRIGMIRYDVLVDKNGNIRFTGKGATHKNEGAIYAGLYSLSRGDKVWKDYFKKYPEVQENL

SEQ ID NO: 912 - protein, 317 aa, synthetic construct; identical to SEQ ID NO: 379

SEQ ID NO: 913 - protein, 317 aa, synthetic construct
TALGRRKAEDRIKETLWADGVKIDEKDFEHIKSSHEDYFAVEYGKGSGYYDVNKKMDSEDTALCVGAVVTNMFHWWVDQNRENIEKFKKQNPENNGVMKFEGVKEATVDELNEFYRDNRDNYADQSRFFDLIKKHFGNKALNPEELFELYFNGFYYGSSHRYIEDNEPAQNNLFSKVLENNKLLNPERSYGIDGFSNNVINALKSHKVLGLVYTTPLRYRHIISMWGADIDQDGKVKAIYVTDSDDREITFNDNSKRRIGMIRYDVLVDDNGNIRFTGKGATHKEEGAIYAGLYSLSRGDEVWEDYFKKYPEVQENL

SEQ ID NO: 914 - protein, 317 aa, synthetic construct
TALGRRKAEDRIKETLWADGVKIDEKDFEHIKSSHEDYFAVEYGKGSGYYDVNKKMDSEDTALCVGAVVTNMFHWWVDQNRENIEKFKKQDPENNGVMKFEGVKEATVDELNEFYRDNRDNYADQSRFFDLIKKHFGNKALNPEELFELYFNGFYYGSSHRYIEDNEPAQNNLFSKVLENNKLLNPERSYGIDGFSNNVINALKSHKVLGLVYTTPLRYRHIISMWGADIDQDGKVKAIYVTDSDDREITFNDNSKRRIGMIRYDVLVDDEGNIRFTGKGATHKEEGAIYAGLYSLSRGDEVWEDYFKKYPEVQENL

SEQ ID NO: 915 - protein, 317 aa, synthetic construct
TALGRRKAEDRIKETLWADGVKIDEKDFEHIKSSHEDYFAVEYGKGSGYYDVNKKMDSEDTALCVGAVVTNMFHWWVDQNRENIEKFKKQDPENNGVMKFEGVKEATVDELNEFYRDNRDNYADQSRFFDLIKKDFGNKALNPEELFELYFNGFYYGSSHRYIEDNEPAQNNLFSKVLENNKLLNPERSYGIDGFSNNVINALKSHKVLGLVYTTPLRYRHIISMWGADIDQDGKVKAIYVTDSDDREITFNDNSKRRIGMIRYDVLVDDNGNIRFTGKGATHKEEGAIYAGLYSLSRGDEVWEDYFKKYPEVQENL

SEQ ID NO: 916 - protein, 318 aa, synthetic construct
TALGRRKAEDRIKETLWADGVKIDEKDFEHIKSSHEDYFAVEYGKGSGYYDVNKKMDSEDTALCVGAVVTNMFHWWVDQNRENIEKFKKQDPENNGVMKFEGVKEATVDELNHFYKEYQSNKYADQSRFFDLIKKHFGNKALNPEELFELYFNGFYYQSSHRYIEDNEPAQNNLFSKVLENNKLLNPERSYGIDGFSNNVINALKSHKVLGLVHTTPLTYRHIISMWGADIDQDGKVKAIYVTDSDDREITFNDNSKRRIGMIRYDVLVDDNGNIRFTGKGATHKEEGAIYAGLYSLSRGDEVWEDYFKKYPEVQENL

SEQ ID NO: 917 - protein, 523 aa, synthetic construct
  VARIANT 1..61: note = May be deleted
  VARIANT 374..523: note = May be deleted
MKKQSFTHSRKPKFGMRKLSIGLASCMLGMMFLTTGHVNADDVDHVGETITVVPWQRNNLDTALGRRKAEDRIKETLWADGVKIDEKDFEHIXSSHEDYFAVEYGKGSGYYDVNKKMDSEDXALCVGXVVTNMFHWWVXQNRENIEKFKXQDXENNGVMKFXGVKEATVDELNXFYXYADQSRFFDLIKXHFXNKALNPEELFELYFNGFYYXSSXRYIEDNXPAQNNLFSKVLXNNKLLNPERSYGIDGFSNNVXNALKSHKVLGLVXTTPLXYRHIISMWGADIDQDGKVKAIYVTDSDDREITFNDNSKRRIGMXRYDVLVDDXGNIRFTGKGXTHKEEGAIYAGLYSLSXGDEVWEDYFKKYPEVQENLENNVADSNKNSEDVEVSSVEFDFLNFKYPKNEDQVSTEDMRLTLKDTNVFNQPQVKISFEEQNGNDWKEKDSGTFEEGKKYRLKIDVNKLALKIYGHLSKNKLNVIVNGKAVNIQNVVKKDSIETSFTIYSDSIDLEKINYWTDSFNNWS

SEQ ID NO: 918 - protein, 5 aa, synthetic construct
GGYGG

SEQ ID NO: 919 - protein, 6 aa, synthetic construct
RDNRDN

SEQ ID NO: 920 - protein, 7 aa, synthetic construct
KEYQSNK

SEQ ID NO: 921 - protein, 5 aa, synthetic construct
ESDHG

SEQ ID NO: 922 - protein, 9 aa, synthetic construct
KEYQSNKYA

SEQ ID NO: 923 - protein, 5 aa, synthetic construct
ESPNT

SEQ ID NO: 924 - protein, 10 aa, synthetic construct
KEYQSNKNSK

SEQ ID NO: 925 - protein, 9 aa, synthetic construct
KEYQSNKDR

SEQ ID NO: 926 - protein, 14 aa, synthetic construct
KEYQSNKFNDNSKR

SEQ ID NO: 927 - protein, 10 aa, synthetic construct
RDNRDNIGDE

SEQ ID NO: 928 - protein, 11 aa, synthetic construct
KEYQSNKNDNS

SEQ ID NO: 929 - protein, 6 aa, synthetic construct
QSNKYA

SEQ ID NO: 930 - protein, 8 aa, synthetic construct
PYLSTKHL

SEQ ID NO: 931 - protein, 21 aa, synthetic construct
VGISGSAGGIKSVDSDGDSYI

SEQ ID NO: 932 - protein, 15 aa, synthetic construct
TKSVDSDGDSYKINY

SEQ ID NO: 933 - protein, 20 aa, synthetic construct
TGAKGNNYFGHWHFAVRVRL

SEQ ID NO: 934 - protein, 31 aa, synthetic construct
GHYGVYNGVTYWGHTPLHLAAMLGHLVYGLY

SEQ ID NO: 935 - protein, 16 aa, synthetic construct
QRTPLHLAAWADHLYR

SEQ ID NO: 936 - protein, 16 aa, synthetic construct
LAKGNNYFGHWHFAVM

SEQ ID NO: 937 - protein, 17 aa, synthetic construct
GGFAFDISIDNGNEDVY

SEQ ID NO: 938 - protein, 20 aa, synthetic construct
LLKPKILGYNITSGYSDEIY

SEQ ID NO: 939 - protein, 20 aa, synthetic construct
LSNVEALGYNITSGYSDKRY

SEQ ID NO: 940 - protein, 15 aa, synthetic construct
FLVFGVTYDGSTPVP

SEQ ID NO: 941 - protein, 21 aa, synthetic construct
DDMEAKGNNYFGHWHFAVATN

SEQ ID NO: 942 - protein, 30 aa, synthetic construct
GEIVAFDISIDNGNEDLAEILQLSTYDGGG

SEQ ID NO: 943 - protein, 20 aa, synthetic construct
GGGGGKSVDSDGDSYGGGGG

SEQ ID NO: 944 - protein, 19 aa, synthetic construct
GGGGGKSVDSDGDSYGGGG

SEQ ID NO: 945 - protein, 21 aa, synthetic construct
VMYKGKKLLEAARAGQPDSSE

SEQ ID NO: 946 - protein, 7 aa, synthetic construct
VTYDGST
